United States Patent Application Publication US 2026/0058010 A1 - sequence listing, part 30

SEQ ID NO: 367 - DNA, 303329 bp, Homo sapiens
  source 1..303329: mol_type = genomic DNA
gcagggtcggggtggggaacctcagaggatcaatgatgcagcctgtattgtcaccagggctcatcccaaagcaaatcctgctgaagttctcctctgaacaacccttatcactcatgctaatatgttggatcctgcaagtcacaaatacgaaggtatgagcattggccgaatcccaacagggaaacttcaccgggaaggtgaagacccctttccattaagataacaaacagaacctagaaggcccgtagcatggtggcttagaacatgtgggccttggatgggatcctgccaaggggtgtgtgacctctccgaagcctccagggatgatactactccctggggtgcttatgccaaccacgttagagacaatggtttctgtacccattgcctggggctgccataataaagtgccacacactgagtggcttaaaacaacagaaacctattgtctcacacttccgggggccagaagtttgaaacccaggtgtgttaggatcctgctccctctgaaggctccagggaagagtgtcctctgctccctccgaaggctccagggaagggtctgtcctcttaggcttctggtggcttgcaggtgcagccctccaatcctcctccccaagcggccttctgcctataaggacacgagtcatactggatgaggggcccactaattgatggcttctgtaaagtccccatctccaaataaggtcacattgtgaggtactgggagttaggactccaacatagcttctctggtggacacaattcaactcctaataacgtccacacaaccccaagcagggcctggcaccctgtgtgctctctggagagcggctgagtcaggctctggcagtgtctaggccatcggtgactgcagcccctggacggcatcgcccaccacaggccctggaggctgcccccacggccccctgacagggtctctgctggtctgggggtccctgactaggggagcggcaccaggaggggagagactcgcgctccgggctcagcgtagccgccccgagcaggaccgggattctcactaagcgggcgccgtcctacgacccccgcgcgctttcaggaccactcgggcacgtggcaggtcgcttgcacgcccgcggactatccctgtgacaggaaaaggtacgggccatttggcaaactaaggcacagagcctcaggcggaagctgggaaggcgccgcccggcttgtaccggccgaagggccatccgggtcaggcgcacagggcagcggcgctgccggaggaccagggccggcgtgccggcgtccagcgaggatgcgcagactgcctcaggcccggcgccgccgcacagggcatgcgccgacccggtcgggcgggaacaccccgcccctcccgggctccgccccagctccgcccccgcgcgccccggccccgcccccgcgcgctctcttgcttttctcaggtcctcggctccgccccgctctagaccccgccccacgccgccatccccgtgcccctcggccccgcccccgcgccccggatatgctgggacagcccgcgcccctagaacgctttgcgtcccgacgcccgcaggtcctcgcggtgcgcaccgtttgcgacttggtgagtgtctgggtcgcctcgctcccggaagagtgcggagctctccctcgggacggtggcagcctcgagtggtcctgcaggcgccctcacttcgccgtcgggtgtggggccgccctgacccccacccatcccgggcgagctccaggtgcgccccaagtgcctcccaggtgttgcccagcctttccccgggcctggggttcctggactaggctgcgctgcagtgactgtggactggcgtgtggcgggggtcgtggcagcccctgccttacctctaggtgccagccccaggcccgggccccgggttcttcctacccttccatgctgccagctttccctccgccagctgctccaggaagcttccagaagcccctgcgcgggccttggcttgcagcaaccctttagcatacttaggcagagtcccatatttccttcctgctggaggccaagttctaggggccttctggttactatggctggtgtttgtgtacatcataccctaactgtattcatcaacacttagagtaagcaaggctcgctggagagccacacacactgggcaccgtaatgtcggttataacaccgcagaggagttctgaactatgtatttcgcactcctgggttcatcatctcctgaaatctcagggtggtgtttgctctcagttgcttcagctgagtagctggctttctgtcctggaaagcagactttgtacatgtgtgtgcaacctatgcctgctgagatcatcatcagacagggaagcggcttggtccagagagctgttctcagtagaatgttaagcacagagagctgagaattagactggttatttacatagacatccaaatagaaacctatagagtatctgttaagtcaggctctcccgtcatctcccccatccctgggcaggtgtctaggagatggttttgttattttcagggccctctcaatggctaaaacactctgggagatgaacaagattttaaaaacccaaagcttagcgcacctggtgggtgggggtgtgaaaactttgaaggaaaccgcgtcaagagcctggctgattgttaatatcacgttaactcagagggccaggatacttgcccagacccggagtctgcctgcaagtagcagaggagagctggccttgctctgccgcgtgtctttcttcctgggccctctgtctcgggttggaatttgaatagtggagtagtgtctgccacagtcaggggcctggatgaagtagaccaccagtacggagctatactcaggtacttttcaatgtatatatcttcattaaaaaaaaaaaatctgggccaggcacagtgggtcacgcctgtaatctcagcactttgggaggccgaggtgggtggatcacctgaagtcaggagtttgagaccagcctggccaacatggtgaaacccagtttctactaaaaacacaaaaattatccaggcgtggtggtgcatgctggtaatcccagttacttgggagactgaggcaggagaattgcttgaacctgggaggcggaggttgcagtgagccgagattgcgccattgcactccaacctgggcgacgagagtgaaactgtcctgaaggggaaacaaaaaaatctgtatcaaaataaggatttaactaatagtattaggcactactttaaaaaggctttgctgttagtaaggttgaaagaaatagagccctaggtatacattgggtagcaccttgttcagctgctcagattcttgaaccttgttgaggtcttactttgatatcacctgggccttacttttcgttgtttgggtttcctccccaggtgtctcaatcagggcctcctctgtccttttgcagggaagaagggggtaggaagggcctgaaaaagaacttgccttccccattgccccctcagagtttgttcctctccagtcctcttcccaccctttcttaggacaccaaaaccctgactctttcagtattttataataaaataaagttactaaattgtctgttctgttttgcagaggacacacatttaggagccagtgattcagaccttccatttttctttttggtgctaatgctcttttcagtatattctctttgatagaaaaaaaatggaggcaaaactgaattttctgcattatcttttcctttagcattattcttgtttctgcacttcattctgacccccttccccagcataaagttccatgtccagatccacttgccctgagatttttgacttccgtttgggactctagtccctccaggggacacattgagcctcccagaccctgcagggccctgtgctcattcggctcttgggctgttgctacggtccttcctgaccctctgtttcctgggacaagtagtttttaatgcagctactttctgaaagagctggggtcttaccgcagaatattattttattatttttagagacaaggtcttggtctttcgcccaggctggagtgcagtggtgagatcatagctccctgcagcctcaagctcctgggctcaagcgaacctcctgctttgacctcccaagtaccagggactacaggtgtgcgccaccatacctggctaattgttgttgttgttgtttttagaggccagggtctccgtatgttgcctagggtggtctcgaactcctggactcaagtgatcttccctcctaggcctcccaaagtgctggaattataggcatgagccaccatgcctggcctcgcaggatattatttaaacgaaacctgaaggatttaaaatcagagaagacacataaaccatcacctgactgtggggtgagagtggtctttatatagacactcatgatgcacaagccagcccttcgccccactcttgttttgaagtgaaaggatttatatgggagggaggaggtttgagctgtgcaggagggtccttggttggcatgaggattttgtgaacctacgctgttagctctgcaggcctgtcttggacataggtaagtagaagttggagaccttgtgttgtggaccaaatgttgcaagatgtgtgttctgtggcttttcattaactgctgcatatctgctggttggtggacatagtctagttttcttttgacttaaaaaaattaacagtacagcttatatcggagggctgcatagtttgggggaaactaatgaatatagtatggaatgtaatgaatgactgacttcttcatagagctattgaagtgatttatgaagaggaagaaatcatttttgtgactttgttgatctttgaagtattagagtggctttggcaggtgtggatcacccggaaaggaatcaaacactgagtcctgccaaggtgctcggtcccggcagcaaagccagtcctcagcagcctgcgctcccgaagctcctccagctaagtaactgaataggccgccctgggagctgcccatgcggatgctctgaatggtgaaacttggttttgacaccacaagttgttttcagttaaatcagtggctcagcagcagagcagggttctccaaggaggcctcgtgtccccttcaccccacctggaggtagctgttctaaaaccagtaaaaaattctacaaaaacattttcttagggttgttaaattagtcatagtgtgtgtaaccatgaaaggaatggtgagagtgcaataaatgcctggtgtgttcactctcctactcctaaaagtttcttggtagaataatttcctacctgtgatgcttgcgaagtcagcagaggctcccacccagccctgccgcccattcccagaagtctgggctgggggacaccgaatggatagtccaccagcggcgtggcttgtgaaaggaggtacttgttaaatctatgtgtttttattatagacatcgttctgccagtcgcaataatgtgtttatggacatttttctgcaagcacagcgcgggtggcagtttttactgacaaattgagtcatatgcatagaggtttagaaagcgcttgccttattgacggatcaggcaattctggcacgggatgttcagagatatttaggtgggtgaagagagtgaatgaatctcagggcagagaaggagatggggcattatatgttgaaatgcaataaataatcgctagttatttatcatttgtttttaaacttttagctacattgtacttcccagtcaagaggactccggtgggcagccggggatatcatgttcaggtgtctctcctgcttgtgtggggtaagagccactactggaatgcgattccagcaaggcctgacgagtcacagccccttgaacctgttgctctccgtaaagtgggatcttcacaggcaacagtggaggagcgtttgagggtgacctgggccctctgcatcagaattactgtgggtgctggctagagaggtctctcgattgcagggccccatgggagacctacaggaccagaacctggggatgccaggggattctggcagaccctaatgcttgagcacctctagggaaggccttaggatcctctgggaagtagcactctccagcccaggcaagatccgagtcccccttccagaagtatccatcggcagttggcattgctgcaggttttctgtgcatatgggtctgagtacggttttgtaactcctgagagacgtgaatctcttcaaattgcaaacccaacatgttattattgcttttgagttttcagttttgtggttatgacaagatgcagatgttaccaaaactttggcgtcagttttacaaacacacgcgaagcacgggcaacccgtatcatatttcaccccttctttccttttgagagggttgtcttgtttttaatccccctctgggtcaaggcattttcctggtctcaggtgagggtgcactttcagaggcacagctgaatacattttgtgggactgaattgagcttttctacaggaagtgccaggccgtgtgtgggagtgatgctgtttcctagctgggtccccctgggcaactcttagccctccaggcacctcctcatccattgggtggggacgattatgcttattcggtctacccgggtaagtataggcacacgagacagtaaatacatatttttttaaaagtaaaatttctatccactacatggatagaaattttaatttggagctgagtctcacggaaggatgaaacgagaagacggcgaagaaccatttcgagccctcgttttccccccagtccaatccgaatctgtattttgcagatctgcacacacccaagccctcactgggggcatgtgcacggtggtcagaagtgcaccttctgggaacagatgggcttccgtttggacctgctttacaagttacaatcctgtgcccttgagcagagttacttaaccttccaaggccagatttctccaaaagcagggccagggacagttcccatccagaaggaggcctggcgctggggaggcctgaatgaaggcggttggtgtttgcggatgcagagtcgctctgttttggtggaggcaggactggaggtcgggatcacttggccacatttgccacctctggtgcgtctgaggtcacagtgcattgtctgtgtgcagcataaggtagttccctattcatttactaggtccctgaagtccttttgtctgtaaagaggctactggctctgccacctgcttctgtcttttcacagtagacattctcgacgtggcagcattctaaaggttcaggtgtgccacatcggcctagagtgggcaggtgggcttcatgtgtgctcctaggggcacttggcagttgctgatagcccgagacactgggagccttgacattattcatctgttatattgaaagaacttcccaaaggacggacacaggatctgacacgatggcagtggccaggaaccagcagtgacaccagcatgtgacagtattttcccatgtgtgacggccgtttagatcacagcagtgaggggtaacgcaggtccgctgggtaaacttggtcaaaaatgggaagtctgcagcatttcgtgtgtttgtggaaatgggccttatttttatttggggtgtctccttaatctcctgtcatggttcagctcaccctggtggttattctgggcgtgctgcgcttgttgccttgtacagaccaacttaggaaaggctcaccaccaccccatgaaggagaaggcgctgtgagtgtctttattttgcatatgaggaacccgggcctcggagagtttgagtgacttgcacaggtctcctgggatagaggtagagttttgttttcaacccagatttatttgataaccaagtgcaggctcataaccacttgtgccaggctggctttgcaacgatgagcctgagaagctgttagaagtcctttaaggggcaagacagggtgtaaacagacacagacctgtttatgtagctaatgttttctgaacatcaatgtgaccaagtgttgtctttagcattgtgggaaaagcaattcgcccaagtgtattcctgcttgaaggcgttgagccgtagctgaggctgggtgcagtgaggacttggggatggcaaagctgtccctgcgtgtgccttgtgcctaccccgcaccccactagagagtggaacgaccagggcagtggggccagaggaaagatgggaggatgcagagggccagccatgtcccgggactgtgcacacgcttcaccatgtccctgcaggccagggacccatgcctgattccctctgaaacatttgcgggactgtggctaccggtcaggtttctccaagtggcccaaggggtgggcattttgagcagagcagtgggactatggatgcgggtacatttggggacctggccatagttgaatttgagcagggtgtggcaagcatgtggggctggacaggaaggcagagctagccagtggggccagggcctgcggagcccaaatgctgcgctgggtgaagggccttgggagtcttgtgagtggggaacactagcctgtcagtgcttcccagagaagatcacggggctggcaggggactgattggggcagaggatgcaggatggtggcagcaggcctggcagggcggggacagttccaggaggtatagctggggtcaaccctggtggcttctggtgagagcggagcaggtgggagtcgcagagtgtggttgtgagggactaagtttagaatcgcttttcttattgagagagacgaaagccttggtgtgtgtgctttttatgtgagggaagccagataaaggatctggctttggaagggtagacaggccgccctctgccctgcctggcatctgggttctgaggcgggagatttcccgactgcagccgcgttcaggcgaggatggcagcggtggacccaggctcattaccattgctcccaccccagcctgtccctgttgggggcaacctgtacgtcctgcaggagtcacggaattttaaaaaccaaaccgtcaggtgttagaggtacagtcacatcagaatgcaaattagaaatagtgtgtgctggggccttaaacaccatgacgtgtttcgtgggctggtgcggctgagtgtgcccctgggcagcagagattgacgagggtggctgggcttcctccgggccctgggctcgcagtggccttgtcttcaaggggctccccgtgtggtagggagacgtgcttgtcacacccatacattttgtaggtactggtgagggctggctagactgaatgaggtgaagagcctggcctttgttggggggggtgttggggagcttggtaagtggttgaagatgttgaagaagtcccctctgaggaggtggctttcgagtggagatttgaacagtgagaggtggcaaggtctggggaggaggcttccaggggacgagtgagagctgcaggtgcctagatggctgcaggtcggtgtgttggaagcacagatgggaggtcctatgagggtcacggggtggggtggggagcattgaggccactgttgcaggcctggattcactctaggagtgttaaagccagggtctcagcctcctgcagttgtcatctagttaaagtcatgccagcagggcagggctgtgtgtgtctgggtgatgggggatcagatgagaaagtgcgtgccaccctcagcacagtgcatgagaggcgtgaggcacggcggatgctgcgggtcttataaggcctttaacgctcgaggggaagttcctagaataatgggcgaagaaaaggaatgatatatttctaaaagttactgaatttagctagctagcccaagaaaagcccatgtgtgctattctttattgtgcagaaaaattcgtttctgtcaccattgtgttatcatcagattaagctgtcgagtcagatggatgctgtggttgtgcggggtgcgggccgatcagcacactcccagtgcctctgcaggccgtcagcctccagcccaggccagcctgagaggcaggcgacgtgggaagggaggggcttcccaccaggacacaggaggttgctgaggaggttgcttccatggtgccacttctgaaataagaactgttccttggaaggaatgcacaggttctgaagttagtgttcttaaagttcaacgttatctaccctcttggccatagttgaccaccctgtggtcatccttggcccagcaagagcacaggctcttggaaagccacaatccatgaccatattcacagctgaccaaccatttgccaggaggcaggactttctgtgctaaaatggggatgtcccaggcagactggggtgggtggtccctgcctccctcggctctcattccagggtcctcctggacatcactgctgtcactttgccactagcttgagtccacctgggccttgaggcagaagcagtcgttgaattttctttttttttggttctccggaagcatgggcttataagccttcctgttgtattttgccatgagtgtaattagaacatctcccagagcctgggtcacttccctttagctggacatggcccccgctgtccttgtcacattttttggattgtttgtcactccagaaagccttcagggtcatggttctcacttcctcagacatttttctcttctgggtgtgaggatcttttgctcataagacttgccttctttgggcctgagacgcttctcccccagctgtggagatcatgacagttgcagcagacggcttcttggaaaggtagaaggctctggtgttggctgaggagaagcagctccgtggtctccaggggtgtcctgggttcccaggaatcccatggctcctgggggaaccgctgcctggggcagtgctggttccatggtctgttggggttcctgggtgctcacactgccccagcttagccggcgtgactcaggatgctaggacccatcgccaggctgctgggagtggctgggtggggaggtcagctctggcaccaaggccatgctggggctgcagggcttggctggaaggggtgctgccctgtgtgtcctgctacaaggggccggggaccctcccaactcagggtgtcctgcacgcccacactgcctccctcttctatctttaagacacctgggaagcttctggacatgtcaaacccacaccagactgagtggcagggtccaccacaggagtagcttagtgaagaccagaaatggttttgagctgggcactggcacagacagggtgagagccagccgcatggtcctcgcagcctccccgcctgtggacccctctctcaggccaggcaagtctgtgggctcgtgggaccccggcagtgctggcctcctgtgtttgggcctctgcatctgtgctctgccctgaggttgggtgagtgggggactcgtgtccctctcttcccagagcagcctctgctctatcctcagggaacctcttctgacccgatccccacgcagacatgctctgctgccctctctctcaatcttccccactctcacttcttccagaagctacttcagcccccacgatctctctctgtctggggcccttcacacaccactgttttctactagacttgtattgtttccatctcttgatggtgggatgctagattggatgctctccaaggcctggtgtgtggtttctactggatggaaggcccagcacagagtgctggacacagggtgctgtggactgaaccgtgtccccaagattcacaggctgaagtcctgacctccaatttggctgtatttggagacagggcctttaggaggaaattaaggctaactgagtcataagagtgggatcctactctgctaggattgatggccttggcagagaaagagaggatcttttttcttagaagagaaagagaggatctctccctcccataccgtgtgaggacacagcgaggaggaggctgtgtgcaagccaggaaaggagccctcactggaaacggaatcagccaggaccagcagctctcacttgccagcctccagaaccgtgagaagataaatgtctgttggttaagcccccagtctggtattttgttacggcagcccaggcaaaccaatatataggtgaattacagactaaagttgtttcaaaggcacaaaactcatcaagggattgtgtatgaagttggaatttggggctgaggataactttgtcatcagacagtgctccaaaaaggcactgttctcaggtttagctcttggcatcccaaaagatatgagtgtattgcagtaaaaaacaagtaacaaacagaaacccagatttcatgaccagaaacatcagtggttgtgggaataggggacagcaggcaagacaggagactccagaagccagcagaccatggaaaggcctggtgctgtcctggccctgggtgggcttgctctggtaagcggtagaggaacctgcgccctgatgggaaggagagaccagctcaaatgctgccagactgggtttttaaaaccagtctctacaggttcattgggattctttttgttggttggttgattttttccccccctccagattggtcagtatacacacactaatccagcctggttcaaaggacagcatgtggtcgtctggttggacaccagctacatctctcagaaccatactctttgctgcttttcaggctaagatagctctctgagactgtttggaggtctctgttgatttaggggccttgcaagacatttcttgctgaaagccccgctggcccacacctcaccaaattggcttatgtggctactgatggggggacatagaaaaggtagatagaaaaggttaaatttacttctgtctaactcaccaattcatgctgtggattgtagatctgcaaaatatatcaagttcacagggattttatgattgttgcaaaggaaactcaaattgtcagccttttcctgaaggatcttgccattcctaagctctggctatgcccctacttctggctggctgtggccttgcagtgcaggctggcactgtgcccctggcatctggctttggggggcccagctgtgcagggagcagatgctgtggtgaatacaggtgaagccagagtcctggcttggggaatgtgttctgcttcctgtagtgctctatttgaagtgtggatttcagttcttcgttatcttttatttatttatttacttattagcacagcttgtttgttgttcagttccatagtgagaatctctaagaatatgattaaccttgagggtcatcttatcctgtaattattaatgattgattctgtttatccttgaaatcaataagagaggcataatggtttggtctgtagttgggcgtgatttcttacatttcgtaaacacggttctgtgacagcagttgtatcagtttattacccagaacatgtttgatgaatctgaagtgtatgattagttttatataattattgtgatatgtagtgttccttacatgagttatgttaatatggcaaatagtgttaacatctcctgccactaatagttagggtggggacatataataattgatcttcctgggagtgctgtaatgtaaaaacaattcaggctgttggaagtatattttacaagtatgcgttgggccttggggatgttatattgaaaaacccaattgtacagttaccatgggaacccaattaaaatagattggttgatttttttttgtctttcatcttgaccaaaaatctaatgtattttaaatgttttcatatggaattgtagtcatatactgacttgctgtgccaaagtattctgctcgttttttccaactttaagctaaaatagtgaaaagttctcgagtggatccttatgagaacgtctcccaaagagaatcagtcatgtttttgtggaaaagtttgtgtgagtgatgatggtagagtggaggtggtggaaagcttttatgaaaaaagggagaacaagcattttcctacgagggcagacaagaaccctcatgttcttcctttggtggaggacatgagtgtgtttctccgttctcacgtttgtagaaggtgagattaggtccctaaagggccctctccgtgttgtggaggggttggggtgggggtggagtggtggggtgggatctgtgtttgccctccttgctgggggtcctcacattgtttggtctcagagcctttttgcacagttaaaacttatgagggatcccaaagagattacctgagttatatattaataccccattagaaattagcagtgagaaattttaaaatattgattcatttagacaataaacctattagctttttgcataaataacattttaaaataaaaactagctatattttccataaaaaccaattagggaggaatgttatcagtttccattttttaaaacttcataatgcctggatgaatagaagacagctagcttctcctgcttcattcagtctgttgtgatatgtttgggttgaagcgcatcaagagaatctggcctcactcaggtaagtaattaaaagggaatagtgttttaacagcttcctcagataattgaggatgttctcctttgacactacatcaggactcggcaagtggtaatttcctgagggtttgtagcagggtgcaatccgagacccgctctgtgaactttttgctctctatgacgttaaaatccacaggtatgccttgcactttgagtgattttgtagcgtctttcatcggccctgtggaaaatgttgcttcattgagttatacagatctttcaaatattgatgtttcctaatacagtcctaaaaataatatttgttaatatcaccacctttctccttaggaaagtcatttagtattgggaagccatggtggtgggtaccagtattctaacattttaatcatcacttgaaagttctggctgggcacactggctcatgactgtgattccagcactttgggaggctgaggtgggaggatcacttgaggccaggagttggagaccagcctgggcaatatagcaagatcccgtctctacaaaaacattttttaaaaagaaagttccccttttatcatcagcagcagatactgtcagttgtgttcattacaggtacagactattcatttttgagaaaacatccgccagatatgcaagtctgaataactgttgtttgtgagtcattcacactagcaaagcttttgttctaaaatgaagttggtaagttcatcagcagtctctgccatttgcggagccctcctggtggcagcgtcattctggtttgtggcagaagtgctttgctgcgcttcccgttaggtcacagaatgtttagaaggtcaagatttagtgaagtttgattgcttcctcagggcattctgaagtgaacctgcctgttgccctgaccgtgccttcctcctagagtttggtgtcaatatcttggcccttgcggaggcatccacggttttccccagcatggcttctgtgttgtctttcaccgtgcggtgtgtggtcagccatagtttgtgcaggtgccctttagcagatgggggatgttttactcttttctgcagtgaatatggtggataactctcattggtttccatgtcttcaaccaattttgtgttcctggataaatgcccacctggacttggtgaattactgttttcatagattgctggatttgacgtgtggatatgtttgaggattgtgtgtctgttcatgagaggtgttggtcagcagcattcctggagtgtctgtctgctttgttaggagggcaatcttgcactcataaaatgaggcctcttctatattttggattagtttgtgtaccgttagcattgtctcttctttaaatgcttcataagatttaccagtgaagccatttgtgtttgaagttttctttgtgaaaataacattaactatgaattcagttttttttagtagctatagggccattcaggtcatttatttcttcttgagtgactttttgggattttgtatttgtcaaggaatttgaccatttcatctaagtttgttgaatttattggcctaaagttatttttatattcctttattatccttttaatgtctgtgggattttgagtcatgtccttatttttattcctgatattggtaatttgcactttgtccccttttttgctaactggtctggctagaggtttatctgtttcttttcagagagccaactttcgttacttgatttttctctcttactgatttctcctgtttattattgctttcttgtgcttactttcagtttagtttgctttcttttttgtagtttcttagggtagaggcttagatcatttggttttcctttcttcttttctcatataaacatttaatgctaaaaattctctctaagcactgctttaggtgtgctcacagatagacatgctgtgttttcattttgattcagagtggcgtatttcccaattttccttgtggtttcttctttaatgcttgggttatttattagtacatcatttaatttccaagaatttggggatttaaaaaatatttgggtactttcccagtatttttctgttattgatctgcaggggtgagttaccttgtaatcagaggacatacctgttatgattttaatcctcctagatttgttgagagttgttttacagcccagaatatggtctaccttggtggatgtttgaaaagtgtatactctgtggttcttgggtggagtgctctttaaatgtagttgggtaaggtttgttgataatgctcttcaagccttctatatccttattgaattttgtttccctattctaaaaattattaggagtattgacatctccagctatgattggagacttattacccctttcagttctgttggttcttggttcatctgttctaagtgatttcattaggtgcatacatgtttagaattttaacatcctcatggggaattaacctttactcttatgaaatggccttctctagttttgttgtcatattccttttttgaaattatttgatattaggatagccactccagctttcttttgattagtgtttctgtggtaactgtttttccattcttttatgttgaacctgttcttgtcattacatttaatgtgtgtttcttgtagaaaacacagttgggtctcttgctttaaaaaatctaatctgacaatgtctttgtaaaattggagtatttagaccatttacatttaatgtaattattaatatggttgggtttaagtataccatctggctgttcatttgtcattcaccaatttgttctttttgcccttcctccatcttccgtagcttcttttcagttatttggatatgtttttgaatgattccaatttaacattctgtctacactgttggcttgttagctatctctcttcttttttagtggctgctttaggatgtgtaatgtacatacttagcttatgcttatcataatctgcattcatgtgatataatacaacttcacatgcagaataagcaccttaacaaaagtatgcttcaatttctctcatcccattttttgttatattattgctacatatgtaatattctccaatatatagagttactatttttatgttgggcaatcagttttcttttaaagagatttaaaaaatccagaatttacatttatttgcatatttactgttttttgaaatcctcattcctttgtgtagatcctagtttccattgagtaccattttttttacacctgaaaaccttgtaccatcatttctcaagtgcaggtctgctggtgtctgaattgtcatgcatttgtttttgttttttgaaaaaagcctttgtctcacctgcattcttgaaaaaatgtgaattctaggttgacctgtttttttgctttttaatactttaaagatgttgttccattgtgttctgccttgcatagtttctgatgatcagtttgccgtcattcttaaatttgttcttctgtatgtaatctggcatttttgccacctctggccactaaggttttctctttgtcacttgttttcagctgtttgattatttgtttttatgtttcttctgcttgggtttcactgagcttcttgcatctgtgagaatgggttacatatcccttatctgaaatggttgggactagaagtgtttctgattttggattttttttggattttggaatatttgcatagatagataggtagataaatagatatatagatagatagatatagatatagataccttggggatgtgacccaagtttaaacatggaatttttgtttcacatataccttatccacatagcctgcaggaaatcttatgtattattttaaataattttgtgcatgttacaaaattttgactgtatttcaactgagacctgtcatacaaggtcaggtgtggaattttccaattgtggcattgtgttggtgcagtttttgggttttggagcattttggattaggtgtgctcaaccttgttttacctcatatagatttttcatcagatttgaggaaatgtcactgaatatttcttcagatatttttcctgcctcccctttttctgaggctccaattgcgcatgtgctgcttcatactgtcctgtgtctccctgagccctgctcatttcctcagtctttttgtgtttctgtgccttgatagtttaaaaaacgttattttctcattgttgctattttttccttctgctgcatctaatctgtacatcctatcgattgtattttttactttagagactgcattttacatctctatatgctccatatgggccttttaaaatatcttctatttctcatgtcatatgtgggttctcctctatcttctcaaatatggagcatgtttataagaactgtttttatgtcccagtccccttgttttacgcatctctacttttctgggtttggttctgttgaatgatttttctcctgattgtgggttatatccctctgcttctcatgtgtgtgtgttttaaatgggatcctagacattgagagttttgttgtggagtgctagattatgttgtcttttaaaaaacagttttggactttgttctgctgcaggttcagtttcttgaaattgtttgtatcctttcaaggtatcatgctttttttaaaaaaaggttttgttagggcaggtccagaccaggttttagtccagggatagtttagtcctactatttacataatgtctttactttataagggtgtgtgtatgtgtatatatgtatgtgtgtgtgtattatatatatgtatgtgtgtattttatatatgtgtgtattaaatatatatgtattacatatatatgtatatatatgaaaaataaggcagctctgaggtctttacctgatgaatgttgtattaggagatctttccacactggctggtgagaacatgaaatattcccagctctgtctgtgatcaggaattatttgggctgctacttctgggcatctttctttgacctcagggagttccttctcaagcagtgtctcagtagttaggcagaggccacagggactcttctggagatgcctggcgtgttctctgagtaggcccttcttccctggtactccatcctgatgattctaggtgttttgttctttttgaattctaatctctctccccactttggtgagagcacccactggttttgtgccagatgaccctcctcctccttggcacagcctggaggctgcatccagccgttctctggcggctggctcacttcacttccctttccttggggagcatagcccctggctgctgttgtccttgttctgaagaccattgttttatataaaagttgagcacccctaattcaaaatctgaaatgctacagcatctgaaaatttttgaacattgacatgctgctcaaagctgatgctcaaaggaaatgcttattggagcattttggatttttggattagggatgctccaactgtaagtatttgcaaatattcccaaatccagaaaaatctaaaacctgaagcacttctggttcccagaatttcaggctactcatcctggactttatttcgttttagctgttacatgtggttcttgctgctctgtcatggctagaagtgggatccccaccaagttattagtggactcataaaaataaaagagaggcctgctgggctgttaccagactgagattgctcagattacacaaagccctctggccctgaccccagactttttaccagcctgaagtgggtgaaaagaaagcttcactgactgctttctaggcatgtttaagcctgcttattctggccctcacagaataagaattcaaaggacaataattttcaagaagacttaatttaagttcatctaccttattagacttgatatagatagatagcctttttaatttttttttctcatggaaacagagttgaagaaaactaatttaccttctaaatttaggcacagctaaccaagtcaaggtgtggttctgttcttctctgttctcttctcttctctttttttttttttttttttggtggggggtagacagagtcttgctctgttgctcaggctggagtgcgatggcatgatcttggctcgctgcgacctctgtctcctgggtttaagcaattctcctgccttagcctcccaagtagctgggattacaggtgcccatcaccacgcctggctaattttttgcatttttagtagagatggggttttgccacgttggccaggctattctcgaactcttgacctcaggtgatccacctgcctcagcctccagaagtgctgggattacaggtgtgagccactgcgcccagccggttattgtattttctgtatgctttttggtcgttcagctcatactcagtctttccctgtactgtttgagaaattcacaagtgaatcccagatcacaggtgtttggtgaaattggtataaaccttaactgactttctgttaagaaacataaaaaaatttatttgtatttctactctgaagaaggactgttcaaactttatatggaggggacccaagattgggaaggcagaggaaacaaagggcgtctttgattcacattatttttctcttgtcatcattgcaggcttaagtgtgtgtcatcactagaaatgtattctgttgatgtctgtcatttcagcattttcatgttgtcaaaaatgagaccagacagaagaagagtgtattctttcctgctagaactcgcacaacactgtcattaatgcctctggcagtcaggactttaatcagttaaatgtaatagtggtgataacgttaaagccttgtatggcagtctacccgggcagcctagagagccctgtgcaactctgcatttgaaaaatcaatcaactagggctgtcttttgtcctgggctacttggatagctggtatgaaccacccagcactagcctcctgcttgttgagatgacacttttcctgaagccatgcccactcttgacaaagaataattaggtgccctgcataagtgtatggggacctgcaggtggcttggatggtttgccctgctctcatgggggtccacatgagcatacagaatggaagaagtcatgatggttgcagtggttcctcagaggaacagtgagtttttcaagtaggactctgattatctgtaaaggccaaacttgttccagtgacatcacatctctggggttgctaggaagtaaaggagaaaatgggttcacttgcacagttttggattacatgtaagttttaaagaataggaatgtgtgtgtgtatgtatggtatatacactatattatcattaccaaaaatgatgcctcctatagacttttggtagaaaggaaatttctttctcttctggttgtctgaattttgttttcctttttttttgcttccctccggaagggaatcaaaaaattgtatatatatatgtacacacactatatatgaaatgcctgttcatatcctttctgcctgtgtttctgttgggatttctttttcttattgatttataggattattttatatagtctggattctaatcctttgtcaggtatattggctgcaattttcttctcccagtttgtggcctgcattttcattttctttatacactgctaaccatgtaggtgtatgtatgtatatattctgattgtgggttatatttctttgcttcttatgtgtgtgttttaagttggatcctagacattgagagactgtgtgtgtgtatatatataccatataggggtgtgtgtgtgtgtgtgtgtgtgtatatatatacacacacaaacacacataggtgtatacgcaggtatacacacacacacacacataggtatacacacacacacacacacacacacacacacacacacatgaatatacctatatggttagtagtgggaagccaagctgtttctcactgtcagatggttaagttttgaaattttctctcattctactcaagggtagaatgattggagtgtcagtgttcaatgctacaggacaataacttttgtaaaaatggttaaagcagattagaccccagtcagttaatccacctcctcaccaaaacttggagttatcatgctactaacactgctaacctactgggtaaaaatcctgtctcatagtgatcttaattagcacttccgattgagagcaaccttcagcatcttttcgtgttgccattcatcttttgcgaaatgcctgttcataccctttctgcccatatttctgttggattttctttttgttattaacttataggattatcttatatagtctgaattctaatcctttgtctgttatatgtgctgcaattgtcttctcccagtttgtggccatgttttcattctctttatagtgccttttgatggacaggagtttctaattttaatatagttgcatgtaattgaatttatgattcttttcctttatagtttgcacattttgtgtctcgtttcaaagtgcttccttatccccagtcataacaattccactattttcctatgaaagtatcagttttccttttcatatacaagtctgcagctcatttgaaattaacttctgctgtggtatggagtggaagttcagttcttttttaatatgaataatcagtggctccagccccatgtatagagtaaccccacctttctccagggctctgcagcggcttcactgcaaatatatgacaaacatgtgacatgtggatatagagcaagagaggcactgcagagccctagagaaatgaggagagacacagtaaatggtgctggagctgctgactattccaagtggacgcatgcctttttctaggctctcctgttccattgatctttttgtctttctgtactaacgccacaatgcattaattactatagctttaggctaactcttaaaattgatgagtcagccaggcacagtggctcatgcctgtaatcccagcactttgggagactgaggtgggcagatcatgagttcaggagtttgagaccagtctagccaacatagtgaaaccccatctttactaaaaatagaaaaaattagctgggtgtggtggtgtgtgcctgtaatcccagttactcgggaggctgagacaggggaattgcatgaacccgggaagcggaggttgcagtgagctgagatagcgccattgcactccagcctgggtgacagtgcaggactctgtctcaaaaaaaaaaaaaaaaaaaaaaaaaaattggtgagtaaatcctcatatcttgattttccattttcctcttcaggagtttcttgattcttttggggcctttgctcatccattcgcatttcacaatgagcttgtcacattcttagactaacctgtttggtattttgattgacgtccttgggtctgtagactaatgtggggagaataagatctttaggatatgaatctgcctcttcaggaatatgcgctcttgcactctctgtctctcttggatttccttaatgtctctcacattttaataagttttttcataaacagcttgtgcaccttttgaaatactccccgtgtccttattttttgttgttgccattaatattataaatggtatctttttctaggattagatttttctttatgactgatatgcggaaatgctattaattttcatgtcatctttaatttactttctaattttttaaaatgaatataccacatatatattctttgttttttctacatagacagagttttgcttcttctactctgtaaaccatttctttcttttacttgtcatattgcactaggatctccagttccattttaagtcgatgtggggataatacactcatcttgttgcttattttaaagggaaaactgctaactcttcattaacaaaaatgatgcttgctatagacttttggtagaaagaactttccttctcttctggttatctgaattttgttttcttttttttcttttttcttattttgcttccctccaggagggaaacaaaaaattgtcagaaactatttcagagctgaagaaaacttcttaatctccttctcctctactgttccttgaaaactttttaaaaattatgaacaggcttcaaattttattaagtgatttttctgcatctatttaactgtttatgtggttcccatccccatatctgttagtgtggatcatgacttctagggaattattaatgttaagctatctttgcattcctgggatgaacattacttggccactaagaatcatcctttaaacacctgctctagaccaagcttattaatttattgcttttaactttggccaaactagtggtttaattgtttttaaggttatttattctttattgttattaagattattcttttttaaaaactggttaggttaattatatgaagctatatttttgcacagtctatctttttctaccctttagctttcagcctttgttcttatatttaaaatatgtgtaaagtaatatagttttaaaaatatccagtttggtagtctttattttttaattatttagtccagtcacattaaaataattatagttgagcttacttttaccatcttgctatctgtcttctatttgtcccatctttatttgttcctgtatttctaatttattttgctttctttatgattaatagtttttaaaaccatttttctcccctttctggttatacagatttgtatgtttcatttagtgattagcctagagattataatatacaccctggacttactatagttcacctaaattgctactttgccacttcctgaatagtaaaatactttacaaaatgttagtcatttccctttctcccagcttggatgctgttgtattttaattatatatacacatttaaaatgcagtagtcacttttgtcactgtttaaacgtttggtgtttgtgtcaccgtgccccatgcttgccctccagtgctctccattggttctccatcatcatgccttcgtctggggtgacttctgcttgaaggacttgtttgtttacttagtttttaatgctagtcaactggcagtgaattggtccatttttaaacactaatagttattgattgttgagttagcaattctttaccttataaaatatgacattccatcgtcttctggtttctgaagtttgctgaaaagtcagctgtcagtcttattgttgcacttttgaagataatgcaaatgtttttactctggctgcttttaagattttttctttggtttgaagctaattgtgttatggttctttgaggttttcttcatatttattctgcttagggtttgctgaacttcttgaatttctggattgctctctgtcatctattggcaaattcttgaccctgatcccttcaaatattgctctgcctcatccaatctgtcctttcctctcggagttgaattataggtaggttagtccttttgactgtccctcggatctctattcttgttttctttccattcctttcccctttcttgaccacagtttggatattttctgctgagctctctggcagatcacggaccttgttttctgatgtgtccagtctgttactaaacccatccaatgaatcctgaattacaaattttgtatttttcagttctagaatgcccgttttgtactttaatatatattttaattctatatttaaaattcttctctttcccacttatgttgtctgtcttttcctcttattattaagtgtatccattgtaattattttacacttcttatctgctagcaccagtattgtggacatctattcctctgcttgtattttcttcttttttcccttctctttattattattaaatacatgtttttgctttttgcatgcttttaaaattgtgagtgtttgctggacttgtgcataaaggactgtaaaacctctggattgtcgtgtttttcatcaaagcaaaagctctctttgcccttggttaggcatatggagtgaggggtgaaggaccttggtttcatgagggattgatctgggtcagggctggcctgttattttactaaaactcagtccctagttggaccttccctttgagcatggtcttttgattggaagcccatggtctctttctcctcagcctgtaaatgctttgggagatcccttggttctccccttagaaggttttgagctgagctctttagcttcccacgtcccctgtttcaaagtctcctaaatgtcctgatgggagatgtgactatgtgtgaagcaggcccttctctctctgtctttccgcctacctttcctcccaccccagtctcgtaagtgctattagattaagggatagtgtgcttttccttttaggagccctcacttgacccagctctctaggctcatgaacgcagccccataggatagcaaattgattgcacttttggggttctgattctgatctttcatgccatccccaatgggccacccagagcttccctggtttcccttcccaggtggagtggctttgtgtggactgccacggtgctccccatctgcacccaggatcagcaagtgtttctgggcagcaaagggcagtctccactgtacagtcccagtccccctagtcctggttgcttccacagctctataacattttaaaagacgagttttgtaatttttctgactttttccagttcctgtgggaacattgggctgcctccattagttcgttttgcttggaaatgaaagtccattctgagcacttgcttgaaatcttgattgaagtctttgatttctgctttctccttggtcatgctttctcctgtcatctatcttcctttgcccacacatttcataaatgcttatttcgtattctacacaggttgctttaaatatctgcaatcctgtgggtggagtgtgggctttgtggttttcatctttctgtgatttcttgtaactcttacgatgacacgggaccttgtttgatgacttggttgattattaatttatatgggctgagcctgatctgtttgactcctgagtgcctaaattagggatgcttttccctaagggtgggtgtttgggtttctgttgcctggaaccagggggtctcaaggcagcaccactcagatctaggactttctaaggcttctcactcaatcagggccctcgggttgtcagggaggccccagtggagcgtctggaggtcatgaggtgtgcaccttctctgctgatgctgcccactttccctctgcttcctccagccctggcttactctcctttttccaagtgccccgattctctttggattgcccctgcttactagagaggccattcaggaaactttgaaacattgccatttattcaatatctagtgcatcgtagtcccttaatccaaaacaactggtttggtttttgcataaagctaccagaagataaatatagataaaaatcttgaagatttagaaaaagtaatattaaaatagatccttagatatgttcttatcaacatctgcaagtgttcatcccaatatggattccatcagttagaggggttttaagaggggtcactgtgcgccaggcccagtgtgggatctgggggaggttgtcaaagttgtcttctaatccagaacaacttgctcactaatatttatatttctgccttcaatctgggaagcagcccttttcagaaaggtttgctgcaatactctctaggggacaaagctgagtgaaactctagaggcttgtcttatacgcatagacatcacgtgcacacttacaccccagtcatttccgcatgtgggatcatcacagttgtgtgtttgactttttcacctgaccttgtaagtgcttagccatatattgaactctttaatatcatttttggagatggcatagtgtcctactgtaaagatataaccttcttccattgttaggaatttagggcaatttcatatctgagactctgtcttaaagaattaattaaaattttgtgcacaaagatgtttaatatagtgttttgagaagtcaaaacacagggaagacttcttgtgtcttacactgagaaattcttagccagcctcttagtttcctgaattcaggactgtgttgtgtaattttgaagccccaatagtgatatggtcatttttttcatatcttcattcaaaaaacctcagtcacctggggagtgggtggggtgtgtgctggaccctgaccttgaactgtccagacaagttcctaaccacgtggagctcaagcttccctggggcttacctgaatgacctgctcagtggccagccacttgctgcgtgtcagccggtgaactctgggttcctggcttatcagagacttcaagtcctcattaccttctgggtctcagtttccctaatatgtgcaatgacaggattggccagggctttccaacagaagtttttgcaatgatggaaatgttctgtgtctctgctgcccaatgtggtagccactagtcacattggctgctgggcacttgaaattgactcctgtggcttagaaactgaattttaaattttattacattccaattaatttaaatttaaataagtagccacatgtggctaacagctgcgtatggacactgccagtctagacggatatgatgcttgtttaatggtcttaagaggtctttagagtctattctaatcctgacatctggttttctttgcttgtttgtatttatttgttcctttatttttaccacgactgctctgagtaccaggaactcctttttgggatgtcacagatcaccaacttccttctctgtgctgtgtcaatagggacgtcacccctgtggggaaaggaatttgcctgaacaagacactaaaaagataaaataggctgaagcggagaagaataaaagattgtgctggcatgagctagttttgcaaaacccatttaaataaactcaggatattaccgaccccatgcacacattctttccttgactctgcaatgttccgttaaaccagattgtgaatttttttcaggattaacaatttacatttatgattctattttcttttataagtaactgctatttgtaaatgagactaattatttgaattcatggtacaaataacgtaatttagagttacagaactcttgatcctctgggtctaagcaaaataaacgtagtacctaatgctggaatagagcaagagttttctttgaatctcaaaatatctgcattgtgaaactgggttaagttattttggaaactataaatagtcacttggtaattaggtgtttggttttatttgttctaatggagtgcttattacagtcggtgcatttttaccccacggatcagaagcttttataggccaagtgatgagagaccatcttctacatttcatttgctgattgtgactcatcactgatgatcgatggactgctgaactttttaattcctgtttgcttgtagagaaagaaaattctcatctcttttgataggtcctactccaaaattctgcagccgttttgtacaatcataaccttacacgatatcacacaaaggcagagaaacgattgcatggacatgccttcctgtcaaacgtgtatggaatctggcccgtcctaggcttatctctttccaccaggattcttcttcccatttttctcagcagagcatcttcacgtagttcacatgacatcagaacttcatcaggatgtaagttcctgcagaaataggcctgtgtctggtcagtaaacagagaatgtaatgacattcccagagcattcacaggccagagtctggtgtcctccccagcgtccagcaggctgcggatggatggcatgcagctgacaagattgatactgcattagacattcctggaggtccctgcggctggggactggcactcgcaggcctccccctgcacacagctgtctttggagagcacagagcaatgggaggcggttttgttttactatttgccatttagagtctcacttttaatttatcctcactctttaagaaataattggtaatttatttcttagagatcaaatgttgctacaagctgaaaactgttttataaatatttcaggaaacttgaatgcctggaattttcatcgtcacgcttaagtcttcctccaaaaggggatggacttcgttccatcccgctccaaaagctggtccgattcttgcctgggtgttgtatgctatttgccttttccataggctccaataacaataagtacatcttaaaattgatgaaagtttaatgaatggctagcaagcagagagactacttttataacaagattaataccttggctcaggggacataacattttagtaaaatcaaaatttgtatagttatcctagcggtgcttgcaacctctggcttccatataaaaatgtctaaataaaatactggcagccgtctctagccattatttccatctgctctaggtggcctgacccggaacccactcagggtggtgcactctgggccggggtctctgggatttctgtcgcatcagcttgtgcagccgtggaatggggatggggcactgaggctagctgtcccgtgctctagaggttcctgggaaaaaaatacagagagaaataactcacaagggagccagcatttggtgttgttttaaataaattcattcatcatctataccttttccccttttaattactacactttaaaagggatcttggtatatatttatttttgttttgttaatttttttcttttttaaaaaattaattgtagagatggggtctctctacattgcacaggctcgccttgaactcctggcctcaagtgatccgcctacctcagcctcccaaagtgctggggttacaggcatgacccactgtgcctggccagttttttttccccctttttggcaagggaaggctatcggggtagaagttctgaagcaagtactctgaatggtttctgattttaatagggggagcatcatttcctgatctaatttataatgtgatataaagctgctggccagctgacactaatcttaatttatgatctatttaacctttatatttcctagccacagctcgtaccactcccccgtctctgcaccagcatgtttcagaggcaggcaagcagcatcagttctggatcctggaggcaaggggagggttttcacggaggggcggtgcacagctctgtgcctccccggtcagctggtccggcactgcagtcagcagcaagggcgtggtgagggccctgcagattcttcacactgtcctggtcctctctcctgtttctgaatggcaggactttggggtcagattagaccctgcatgtacatagatgacaacggaatggctttttggggggactttttattttgagataaattttagacttgctgaaaagttgcacaaatagcacaaagtttctgtatgcagccaccatctggtttctgccagcactaacacctcacacttaccacaaccagggcgctaacacgggtgcactactgtaaaccttgccatctctcctttgtctcctctagtgcaatggtctgaatttatgcttcctccaaattcctgtgttgaaactctacccccatggtgatggcctttggaggtggggcctttgggcaatgactaggtcaggctggagccctcagaatgggattagtgtgcctataaaagaggactgagggagctcactgtcctcttccaccacgtgaggacgcggcgagaaggtgctctctgtgaaccaggaagagggcccttatcagacacgggctctggcggcaccttgatcttggacttcacagcctccagaatgtgcgagatgaatttctgttgtttacaaagcacccagtctaaggtattttattccagcaaccagaaggaactaagacgtctaacttgtgacagttcctcttgccttgttttttgtgaccctggaccctttcgaagaatactggtcaggtattttgtaggatgcctctcgtttgggtttgctgatgttgtctcacagagagacagaggttacgtgtttttggtaagaaggctcagaagtgatgtgcccccttgggccatcctgtcctggggacatatgtctgtcagttactgtgatgttagcttggtcactgggtatggtgaatctcttgtgcatttcctcttggtaattgaagttttcccattggtaattaataccttgggggagatattttgagaccattttggttctgctcaggctttcacccactcatcttagtgaccgtgggtgtgtcttgcctgtggcagttattactgtactgtttccctaatgtttgtatttccctccttcccttttcatttaccaacgggaactgttctgtaaggaagagctgtcttttctttcccttttatttattagtcattgaattattcacatcagcgtagactcatggatatttattttaatttctggggtatagtccagtgctgtctttacttaattttgttactcaaatagcccccagtttggctttttggaaactcttgggtttggctcctatgtcttttggacctgcccatcgtttttctagcgctttcctactttctgggatcatagtatgatccaggtgtatcttgtgttttccctgccccagccctggattcagtcacttctccaaggagcctctcttccttttagctggaggatgatgtttagcagccaagatctgggtgctgagtgtgcttgctgctgctgagtcactgctcttcctgcccttctcagtagggggagctaggggctgtatgtgtgtctactgacccgtgcatctgcatttatttctgtgtctgctgtctgcatgcatgttaaaaactgcaagttcatctgatgcctctaacttgaattcatcacagcaggttttattctaatctctgcctttcctctttgtagctgccttctccaacattgagaaacctggccctctttatctgcaacatgtttgcttatatggtggcttcctttaaaaagaatctggtaaaacctgtgtcattgtgtttcagccactagatgcagatgaggcttagtaggaaaagccctacttgtgaagaacagtatttcctatgcttgcttggtggaaaaagtcacagaattttctatagaattctctgtaaacatggttaggaatatagggttgacatttggactcaaatagaaaatgaaatccttttgtttcattacttatttcgttactcagctttcaccttgactcttggaaaactgatggcatgtttccaaatggatatgccagctaattagcttatttctcaaatatccatgttggatgtggaaaacaaataaaaataaagcaaggaagaccctctactgttgttatgtgaagaataacaattacctttaatagcattttctgctaatttagagatttttctttttcttacacttattttctaactcctatgatttgtgtaattcatatcttatacctacatctgattcattatgattcttaattctctttgttgtaaacagaaatattgaaaattcattcgatgaacctaaaaccctttaaaaggtctggttaaattttaacattaagggtgatacagtattcatgctatagaacacagacagtcagaaatcttatgaagtgttggagactttaatggatactgtactatgtagaatctgatcacgagactcctgcttcatcacgtttttactcgaattgggtttcctggtgacaaaagactgtgaagtagctgacggaaatacatccttatgtcagttttcacccgatgactgaaaattgttggatatatgcgtgaaataattaggtcttatttttggaagggagagaatataaccgactgaaaaataatttggagttaattgtcctgaaaattcacctactgtatattaataggttaggtgtttcctaattctttctttcttaagcatatcttccttttccttacactctttttgacacaaacttttgaatatggactcacattataaatcttgggattggaaaggccataaagattggatttttaaaacttcaacaatgtagaggaataccagtgttgtatttgttcagaaagtcctcattggcgctgatttgggcaccgcctggtttcctaccgtagaagcgtgtgctgtggtggggtgaactgggcgggggattcacaccagcctgggccctgggccatggggggctgcctcccagggctgcttcagccgacaggagggtgcggtggtgaagaggcagggctctggggattggaatctccacgcttgactttaggcttctactgctcactcgaaatgggacctgaggcaaattattcacctgcattgtgctgggttcctcacctgtgatacatggattataatatcatctctcttcatgggttattgtaaggattgattttattaatatttcgaatgttaacgttattatttatttattttgagatagagtctggctctgttgcccaggtgcagtggtgcgatctcagctcactgtaacctccacctcctgagcaatcctcgcacctcagcctcctgagtatctgggattacaggtacccaccaccacaccttcctgatttttgtatgtttttgtagagacagtgcttcaccatgttgcccagactggtcttaaacttctgagctcaaactatccgcccgccttagcctcccacagtgctgggattacagacatgagccaccgcacgcagcccaaatgttaagtgtatgacataaaattcagggttactttgcctaaacagttcagtgtctctgattaatgtgatttctgtttcactgacagctttcatgtaaatttaaaactagatagaattacagagcttcagagttgtacagacttgtagaggtaaagtaaagccaaaacattgagctcagtgacggggtcagtcacttcctggtgtcagagtccactgacaggctctggcaactcttgcatcaaaatcctttgcacacaggtcctttcttgctcttagccagtagcagctgtcctgggcagagttccctcagtgaacctggaaacggcagtggctggaggtgagaggtgtccatgtactcacttgttcaaagttgccccctcttccctctctgggcttgggccctgatacctctcagagctaccctgcctcctgcgggggtgggggaggatgcctttattatctctaggccaaaggttggacctccacatatgtccatgatgagggacagcagtcatccctttcaagaccgagaaagtatttaactccttggaaaattgagggtttattttgcagtggtttggaaaatgtgctgagggtggctgtagagttaactaaatagaatgtttcagagtcacagagatttgtaattggtgggcttggtttgtttttatagtgcttactcctttttatctgccttgtggatttatgcatttatttgataagtcagtcatttacctccccattctttggttttcatgtttctgtttatcatcaagataagcaactgtgggttttcttccatcgaagcacctgccgcaggtgatgattttaatggtatgactgccatggtcaccacgaccattccgaggactctaaacatgtttcttgtccaacactactttaatttgaaacaaagcctgaattgagcagcattcgtgtctgtggtagaccagggaggcagggctcacctctgttttcagttcccctttgctggatgtgcaggaggactgccccgttccactccttcaagggtggcttggtcatggacttggtttggctaatgagcgtggcctggagtggcatgtggtgcttcttggtagatgtgtgtgcacaccagctcttggttctccccatgtgatactgggacagctgtgggatgggatgggcgcagcctgtggcatcaagcttgcatgaatcaaggccgctgctggggctagcccagacccgtagtgggtttggtggtggttgttactgcagagcgtcccagccatcctgactagtacagcgtggagtgtgtctatgtcctggagcttggggagagtcctggccgcagtccaggctttgaagaatgttgacttgacctggaatacccacctgtccctggagtgctgtgttcttaggctagttccgtaacctccctgtctgcttcttcatctacacaccatttgatcttccttaggtttgctgtaaggagtaaatgagataacgcatgtaaagcacctggcccggtgccaggcatatttagttaatacgttgcgttcctacccagctagaccttttaacagtccattggcatcaggtcacctacaaaaaggtacagaagctgcctttctctgtggtatttgctttttgattaaaaaaaggaaataaatgatcacataattgttttattttgccttaaaaaatgagtaaaaaaaaaatgtggctcacatatgccagaggtgtgatatgtgagtcgtctctccctgaggaaggctgcagctgaggttgggggtgaattttttcccctgcatgaagaggggtgactggggatggggccgcctcccttcctaaatttccgtgctccctgttggtgtaattaacttaggggaaaccacacgtggggattcaggggcttctccctttattcttttccttaaaatcaagttacatttttttttgagcaataaactttagaacaaaatgaggaatagaaaacaagatgtcgagacaaacaagccttagcgaggcagctgttaaaagcagccggacccaaacagagcataaaaatgcatgtagtccagagaagcactttttctttttacggctctaccccgtatttcatttatatttaaaactgagttgacgaatatgaatacagatatttagagttattgtaaagtcgtatttgtttatgtgcgtggtccagtttccaggccatatcttacagtttaaaagggagagcagttaatggtttcgcccacactgcttggatttttttttttattattatcctccagctcctattcttcaggtgtgcagctattttagtattatgaagaatgatggatgatgcaggaaagtttctttggaagcacttctgatattgtgcaatgcacttgggggtcagctacacttgactgatgcatgatttatccaatgtccctgccacttcccgagataaagctgctgctttatcgaaaatgccagcaactgtgatttagaatttataaacctccgttttcaaataattgttctgattactttctgccttggcaataaaatgataaaggtaattgcacacaaatgtgagatagcaccaaaatacaataaaattaacctgaattagcttgacttgtcgatgagaagtatttatgaaatgtggtgttgcaataagggagggagagtgatattatggctggaaggtgagttattgctttaatgtgatactctttgaaatttaaaaaagagactgtttctgttgagggtgattgtgcttttgaaattaagttgaagtgattcttataattggcaacgagaatgcattttgaaggtaatatcttttattgtgttatgcctagttgcatcaccttttatttagctgtttctggcttcagcttttctaatactcaggtagaagcagacttggaattctgtcggatccaggggctgaaatgttgtattctctttgtagcaatgcccctggtcttaatgttacagactttttcctcctacatttgattaaattgtttagatatcaaaggttaaatattatagctagttaatgtttttttaagtttaaaggcggttttagaaatgtgttttgtttccctgtctttgtgtgcactgggaacatctcattgtagcctgatggtttcaacagtatcagatcagggttccatgtctgatacccatagttcgtaatctgccttttacattcctgaaatgaaattcctggataatatccatctacatgtactatttaaatgaaacactttaggagcagtaatttataataaaataacatgccttcagaacaggaatgcttgggcaggactctgctagcagacataacgtggcaatcaggtgtatgtacctggaacacagcagctgcaaatggagattgagacagttttgtttattggacattcatcatctggtcaacgttgacattggtgatataatttttccaaaatggtggacagcttttgtaaagtttcaaagaaaatgaagttcacctttccattgagttacaggatagttgtgttcttagaaaactttgtgtagagaaaaactgtgcagaaaattttgtgtttgcagtaaacagaattctagtttagggtcttatgaattttagatttgaatgtgttgcaggacagttgaaagtgacacaggttgcaggacgacactgttgtttgggatgggagaacattctacattcttgattccccccttttaaatgtcgatagctcccacaaccattgtgacaactaaaaagtgctttcaaattctcaataaccccctcttgagaaggactagagaggatgccctccagaacatcctcccctggccagattgtgattagatcaggagcttcccagcaccctcctgctcagagagcctgtgccacctcacatgccaccatgggaagcctgagattttggttcccactgttgcctgggaatccatttccaaatgagtggggagagagatgtcatcaaagctgagagtccttggcaattgattgtactgtagtgccctccaccacctttaggacctgattttgtctagcctaggtttgtgtgaatgtggtagggtttttttttctgacttggtaataaagtttgtagtattagtgacttgtaggatatctaacaaagatgaagttttggaaactaaggccaactttggaaagtgttatagacttaaaattgcagcgtgtgtttccccctgttgactttgggagtacagcactggtatgctgtttttccaaggagaatgaagtattgggaaagaattgctcaggaaaaatataactagtaggattttttccagaaataataaatggaattgagaaaattgaagtgaaacaagattctgtggtagataaatatctcttttagtcccccaaccccacttttattttctagtctattgataaactgtatattattatgatagcctactttgactcttggtttgtaaaaatgaaagtataatacaggctttatgattaggctagtgtgaagttacatgttaaaatagggggctgacaacatatcaaatacctgtgtaatttaatattatgtgataaatatgtaaagtaaaaactgagattccattttttccaacattttgacttaaggctgaattttaggggtcattaaattatcatggagctcagatagatacacggtggttctttgtcttactctgggtgtgagcaagctggtcttttccttctttaaaaatggttgagttactttctgtctgcatctgatacatccagtatctcaagtctttgcttgcttattgtacattcatcatctggtcagcatggatattggtgacatcattttcctaagatggtagacagcttttgtaaagtttcaaaggaaattaaagttcaagaacaagctaataaagttttttggcttgttcttgctcatggtgtcttatttccatgttttcctgtttctttgattatactgggcatcatatttgagagattgctcattattcatgagagcagtgtgaagcctgaggggttgtgcttgtccctggggtagtttgatcccttcggtcaggtgctgagcacaccaacaggctttgtgaattgctcagatggccacgagctgagacctgcagagtggtctctcgtctgcagttgctatttttttttttttttttgcagcatttcctcactaggccagtggttttcaactgggggcagttttgtccctcaggggaactttgtcatggtagacatttgtggttgttacaactgagggggtgctgccggcatccagtgggtggaggccagggatgccagtgaacatcccacaacacatgggctagccccacaacaaagaggaattctctctcctgcaatgtcggtactgtcgtggttgagacagttcattggtctctgtagaacttgtttaaagcccagcttgtccctggccccaccccggatttccctgcctaccctcggttcatccatggcatcccatcctcttgggcaggattctcttggtgccatcttggaccccttcttctgttgtgtctttcccatcaccctatggcaaaagagttttccatttctgtggttttccaagcatcccacacctccccttgcagccacatacttagggctggtgaagtagccgttcagtcatctcactggctccagattgttctccaggcatccagggggcatttatgctcatgcccagcgctggtggctgcctcgatgctattgtagatgtccaagtcctgagccctcggactgctttcaaagccccagctgccctaccctgtcctcccatctctcgttcctataatccgctctatccgaaagagtcgacttgccatttgtacaactccatacttcacatttttcttttctctgcctttgtacactctgtttattcaacgtacatagtacaaataccttcttaatctaccccctttaaactcctaaccattgttcaaaactcctcctcctatgaaacttttcttagtccttggatttggatgttgtcatcttcagggcatcttctctgggtttctttgagatcaacacaatatagtcagggctgtgggccctgagcccatctgaataggatcccagtcttcactctgccacttaggggccatgtgtccatcaccaggttacttgagatccccaaacctcagtttccctgtgtctaaagtgggggttccagtgctatgttatgatgctttgccaggctacagtggagagctaggtgaaaatgttcctgcgacgaccagttcctgtgaggaccgggtgaaacaggactgatctagtgttgaaaggtctctgtgagccgtcaggcaggtgacgttggagccagcctctccagggtggtgtgcgtggtgctgcagtctctgcatttatcccatgtccttgggtttggcttccagacggatgtgaatctcccctctggagcatgtagatggaggacaaggcctctggggcaggggtggcctggagacatcgcagtggtcttgtctggtggcacacagacatttcccagtttggtgcgggccgccctgtgcacagctgtcctacagcatcagagcaggctgtggaggcagggccaggctcactgggagcaatggccctgctggaggagatctggctttcagtccctgttcacagagggtcctgctgaattggggacaggggtgccccaggagtgagctctgcagtatgtaggaagtcctagttccggtgctgggggaggaacgtcctgagagtgggccggaggagatggggatttatgagctgagctgtgggaagcaggcttgcagagcctctggtgagtgggccaaaatgacaaatggattctgtgcaactttttattgtccagcctcacactgtatttcttcgcgcactgctgtgtttgccagggttttgattgtattagttacttgtgagatggagaaacctttccgtctcccaaaataaatatggatctgctttcaaaatgttttagctgttaaacttcagcagctagcaaacaagccgaaagcttttgttctcattccaccacaggtttgtagagtttgaatcccagataaaacatgtaccaagccactggattctgggtgggatactaagtcctttgcagggaggtgacgccctttgttctgtgacatttttgtttttgaggagtctcccatttccttctctcaccaagttagttttctgtcttgggtggggctccctaattcttagggacctctggtacagcccagtagcagttctcagcctgtaggtcctagcccgtaggtagacagatgctgtggggcagggccagcccttttgtggagtaaaaagcccttttgcgggtggttctgatggccacaccactccagcccgcctggaagccgccatagagatagctttcacatacctggtgatacgtggcaggtcctagaaggtatgggtgaaggtggtgtgtaccaggggttggcaggggaaggaggaagagaggagtcgtagggctggaaaaggagaaaaaagttgatcttcacctaaaacagtgtgtttgtcagttgagaaaactggttttacacttagaagttaaaggtggagtatatcgaggtaaatgggtgctgacctctctggtatacaacagatttaatttttctttctttcttttttttttttttgttttttgtttgtttttttatttcttttgagatggagttttgctcttgttgcccaggctggagtgcagtggtgcgatcttggctcactgcaacctctgcctcccgggttcaagtgattctcctgcctcagcctcccaagtggctgggattataggcgcctgccacatgcccggctgactttttgtatttttagtagagacggggttttcaccatgttggccaggctggtcttgagctcctgatcgcaggtgatccacccgtctcggcctcccaaagtgctgggattacaggcatgagccaccaggcctggccagatttagttaatttggaaaaccccattaaatagctcagatcagattgcttacttggttgaaaaaaaggcaaaggtaatattttctgtcatgaacaaggtttgtggatattgctaattacttatttgaaagaaataataaaatgaaattcagtaaaatcaaataacttggcagttatttgaaggaagcggctcttttctgctgggctgcgactttgaggagcagttgcgtcatttccgggtgaagccaagagcccttgccatcacctggctccaccagggttctctgtgtgttttccttttgggttgaaattttcccttttagctgcatgagatgtttattattgctactcagaagtgcctggaatctatattgctttaaggtgtgggatgaagtttcctttcatgatggtttaatttttattgcgttcgcatagagcgttgccgccgttcacaggatgcccatgatagtcccgcccctcgagacgacatgcaggattgcaccttccacgcccagcacacaccaggccctgcacacggttcctgtgtgcattagtgtggttgggctccttctctgtgtgtgtgcctggcacattcggatttccttgtgtccttgtgcgatttctatagaaaaaggtgtgttttatcaagtggaaaatagcttacagtaatggtagttaattattttggagttccaagttgtttagaattgatcgaattcctaaatcttgagttaaaattctactctaggatgactaagaaagacatgctgtgtttacgtgtattttccagtttaaccagaggtgactttagacaagtaattctgttctgccaatttatttctctaagtattgtcaatttagctttttcatgggattctgggatacagagttgcttggtccattgaaatctatatatgtaattttgtttttaatcaaacctaacttctgggttttagaaagcatctcctgtccacagcttttgagaaaggtcccgtaaattggatgacaccaaatggctccagcaccagaatgaaaaggaagagcagcagagacttggggcacccacctgggggctgtttcctagtgctgggcagaatcctggggtcagggttggagggccttaaggccagattggaggtgggagcatggcaaggttgccgtgccaggatgcacagtgtccatctggggtcctggagcggcctgggttcttcccgcagggtgctgtcctctgcctgacaagtcctgttccctgtctcctcgggagaacaccagtaccaggactccaggagttgccaggtgggggcatctaaggaaaggaaatgttcatgggatgcgccacagagatgatccctcggagaatattttccggtctttcatagaggctaaaatataacatagttgttagaaatatgtggttttgtaggaagttacataccttggggaaaacgctggaattgacacctgagaatgggtgaaatgttggaagatgttgaacaggtgagaggactgaatcggtgcagagccacacctggtggtgggagcacgttgagggcctgcgggtgcccttgaggaagggttttggtggatgacaaatatgataggaaccacgtgtcttggggaaaacactggaattgatgagtgagaatggatacattattggctctattggaaattatggctgacagatctgaagctctgtcatgcattgggggcttgctggttatttcagtttagtaatttcattgatctgtaacagatatgtgtcaaagagttttaggaagttgatagaagtgtacatattgatgaaaataaaaattcgtaagaaatagatgatgggttcaggtacagaataagggcaggaaaataaatgaaaccagtataccagatgcaggcatgtgcttcccatgatgggaaccccagataccagacgcagccagatgcagccacgtgcttcctgtgatgggaacccggtatactagacgcaggcacgtgcttcatgcagtaggaaccccatatatcggatgcagccacatgcttcctgtgatgggaaccccgtataccagacacaggcacattcttcctgtgatgggaacctggtataccagatgcagccacgtgctttccgtgatgagaaccctgtataccgtccgcagccagacacagacacgtgcttcctgtaatgggaacccgtataccagatgcagcctggtgcttcccatgatgggaaccccatataccagactcagccacgtgcttcatgtgatgggaacccagtatactagatgcaggcacgtgcttcatgtgatgggaacccggtatattagatgcaggcacgtgcttcatgcagtaggaaccctgtatatcagatgcagccacgtgcttcctgtgatgggaaccccgtataccagacacaggcacattcttcctgtgatgggaacctggtataccagatgcagccacgtgctttctgtgatgagaaccccgtataccatctgcagccagacacagacatgtgcttcctgtaatgggaacccgtataccagatgcagcctggtgcttcccatgatgagaaccccatataccagacgcagccacatgcttcatgtgatgggaaccccgtataccagacgcagccacgtgcttcttgtaatgggaaacatctttgaatatgccaggaattaagcagtgagcttcttgatggtcagaacactgatggcacccaaagtagttgcgttaagccagcaccaaggttctgggttgtgtgttttgtttaacacagccatattcacctggccatcagttttttagtgaggagaccttcccagggctattggggatcagatgaggggcctagcatatactaagggcagagctctgaataggttaacaagagccctagatcccattagagctgggactagttttatctgtgcaggcctagagcccccctatgcaaagtggcgtctgggctggcagcatcacctgggcctacccactcctgctgtatcggaatccgcattgcacaagctcccagcactggccgctgtggagggaatggcgctgtctcgtggtaccttctccccaaggctggctgctgctcttccttaggtctgagtctggctgtcctctttccaggtcgaggatttaaagccgcctagctcagggctcagtcctgggtgtgtggctggccaggaaagggcagtgaattcaatttgctaagtgtctgctctgcagatgcaggatgctggagatggggggcgcagaaagaaacaggccctgattctgccctcgcacgtggtggggtagaggcggcgaggtgttggcagccatccctgctttaattgacctgagttgtcattccctcagcgatcagtttcacctgtttgcggactgcctgtagtactgcttgcttcttgttttctttatatcaacttatttttaaacacccgctttaacttcttcctaaggaattgcagtgagaacaagtgtttgctatgctcattttgtttattctgttacacgttaatttaaatctatagttaataaactagtgtctcaactaatctcaccacctgaggcgtgttcaacaccctagagtcagaccacagcctccctgtgacttccccacaccaggtctctggaagggtcgttctcatgcctttgagcttcgggtctttcatcatcagaggaatggactgtgtctcatttgcagggctcttgtaaggattagagaagaggaaagtgagtgcctggcatgaaggaagtaccatcaatgtcactaaacaactcttactattaagtgtttctgagttgagttgtggcttagcgatgcgtgaagcagttgttgaattgtagtctgtgccgttcagtgccttgaatataagtatatttgataacgtttatgataagtgttggtgaggatgtggagaaattggaaccctgtgtgttgctggtgggaatgtgaaatggagcagctgctgtgggacacttctggaggttcctgaaaacatgaagcatagaattcccatgtggcccagcaattctacccctaaggacataccccccaaaattgaaagcagggtcttgagtagatatttgtacactggtgttcatagcagcatcattcacagtggccaaaaggagaacacacacaaacgtctatctgtgagtgaacagatacattaaatgtggcctatccatgcaatggaacattattcagccttagaaagggtgggaattctggcacatgctgcaacatggacaaactttaaagacattacgctgagtgatataagccagtcacaaaaggacaagtactatatgggtccacagacatgaggcacccagaacaggcagattcagagatcaagtagaatagtgggtgctggggggtggggagagctattgttaaatggggacatagcttttgctgaggttaatgagaaaattttggctatagatagaggtgatggatacacaactttgtgaatgtatttaatgccactgaattacacacttacaaaatagttaacataaatattgcattttgccacaataaaaatatatttcctaacatttaaacaaaaggagtgtctgggacgttacctctgacacacctggttatttggcaccaccggcgacccctggctgctggcaggtgtctggagcagcagctcagagcaggaggcccagaatccacagtgccaggtctaggagtgcaggggtgtggcaggaaacgtgaccccgcggctcctcttcagagcctcggggaccaccaaggcagttcttgacactttatcctggccttggtgttcagcatcggaaaacaaggagaactagaatgtcttgactttctaaaggttgttgtaaaacaagggaaggccatgatgcagtgagttttatcacactcttgctgtgaccttcatgaggatgttggagcgtcttttcttcattgcggacagaggcttccaaactccacggctgagccccagttacagtcagtgtgcagtaagtcctgtgggtagtcgtagaagtggagaaaatggcagtatcttttctctaaaaaacgtttacaaacagatacttaatgtgagtttgcttgctaataggttaggttcttagagtttaaagaagtagttaattatcaaagctttttcattcttgacaaccagcatttttcctctaattcaggctacctttgaaatgaacactgcagatctctgagattttcatctgtgaatgttgtttgaagaattcattctgctgcaatttagataaaatgtacctgctgaattttgtaataacattcacaaagttttatatttttgttcgtgtttgaaatatacaatagaggttttcctcgtgatagtgagaatatatcaatatgagagagatacaattatatcaatcaattatttgaacaaagattgggtattgtttacatataattttgtaataattcctatttccaaggaagaacaatgcacaatactttgtcattgtgtcatttatttttattgtagtcttttgtttttattgaaacatagattccatgtataaatgtggattttatgtatatctttccccgtgtatattagaagtatttcaaatcaaataatttggccaaatgatttttctatattaaacattatattttcatttaaaccactataatttctcctagttcagtctgattccttcttgcttttttgcatacagtgagtactatggtccaaatgtttgttctcccacaaaattcatgttgaaacctcgcccgtaagttgttggtattaagagttggggcctttggggggagattaggttagtgcccttatgaaagagactccaaagaggtagagccctcgacgattgaggatgcagcaggaaggcgccatctgcgaggaagtggggcctcaccaggcactgaatctgccggcgccttggtcttagacttcctggcctccacaactgtgagaaagaaatgtctgttgtttatgagccacgcagtctataggattttgttatggcagctcagatggcctaacacagtgagcatgccccacccggagatggccttgcccctcttgctgtcagcatcaggactgacagaagctgggcccatgcagattttccggaagctgtgtcaggtattgggggtcattggactctaaccagtacccagcagacagatgggacctgagagaaagggttggggtctgccccttctccgctcctcagcttcctgcagtggctgggggcaggaaggagggcacagttcaggggattgagagacgtgtgctgactgtccagcagcagcagatccacctgcaggcacagtgcagcctggtgtctcgtctgagaggacacgtgtgcaggacaggcgggacccacagctgctgcttccccactcgccaaggccccgtcaggagcagcagctgcggccctgggagcccacagtccagccaggaggtggtgagcacagggcggagtgtggggttggggactccacttgtggtgttcccagatttgggggatttccgcaaggccccgttgaagggcagtgctccttagatacagtgcagagtccttggggtgagggtcctgtctcattacttgatagcacgtgtcctgtctcattacttgatagcacatgtttcagctggctctttaatgggaaagttggtgctttagtggaagctccagtcccctagatacagagtgtattgcggatatttatcccttcctggctgagcgcggggcagtttctgcctgcagatttgggctctggctctgggttatggacctttgaatgtggccatgccagagtttgtgaccttgacgtcttgaggcatcctgtaagtggtatgacctcaagggaagaaagctagcgtggcctgcatacaggtgggcctgtggactgtaaaagcaggtttacttagcgggagtaattacccatgttgatgacagcctctaacagaggtgcagtcttcaaattcacatttaaatgtctctgcctgctactgagaaatccacagcaagggaaaagagcaaaacagtctttctgtgaagggtctgttttattttttattttattttattttaattaatgagacggtgatcatccagggaacaggatctaaacgcagtctttgaacttgaactctgtatgtggtgtctacaggtttgggtgtgagcagcctcactctgtgctggttcccagcttaaacgtccaaggaagagctcatgacagtttttatattagttctttaaatattttattgtaagttcgtctcttcccagcccctcttgctatttttattgctccatttgaagttccagccaatagcccaggccctttctgtctttgatgtctgtatggtgggcaagatctcatcacgacccacatcagctttgctgttagaaacgtgttgccacagaggagcacattcataattgaaatcaccaaatagggaattctttctagaggcagtggctgcctcagtgaaacgtgcatggctgagcagagcaaggaagagttagtggggccgggggcgtgctgatatcacagtggcgtggggtggggtgaagggatacaggtgtgtccctcctcttacccggcatggtgtttccagaaagcagatgggagagctgtgtgatgaacaggtgagacactggctggacccaggtgagctgctatagaagcagaatcaaaaccgtgtagcacgttgccttccctttcccaatactgtaaagaattcctcttcaatggaaatctacttcaaacttttatcagattaattttaataaaaagctgaatcaatacgaagcagcttgggaaaacagctttcccccaccccagcccccaccaccaataacattttacagattcaggcccagtatttcttgtttctaatgagatggaaggagcggtattcttggcacctgctcatctccttccctttggaaactcagccaggtttttgtcgttagcttatgggtcgctaatgttatgtgcactcatagcagaaatggaaatccgccatcggtgaaagtggagacctttgagaatttatgcagcatcaaaatgtaaataccaactcttatagaatattggggttagcaatgtcgacagttctaccccgagtgcggttggtggtggggctccaatggaaacaaactggtgtccagcagtcagctgtctgcgcatccgtccctcccactccagcttctccaggtaagactggccatgtgagcacagagggtagaagaaggccttagggacaccttagaatgggaggagaggtcatagctggagctccgcttgggggtttctggtgctccgcccatggctcctggacagcgaggggcagtcttctgaatggacctcagaggtcctgtggtcctctttggccagagggcacgggcccccttagctcatttctagtaatgggatgggtgggtgttaggaggaaacacgcagcccagcacaggctccccagagcacatcgtgaatctttctgtcgcctccctgccccacctcacctctgttctgtggcctccctgcactgtgcccctcctgtgtcctcagttgccacatgactgacacgtgcttggggctcatttgatggctctggcaactttctctacctcggtttaccttttggctgcccagtgctggatcgccagtctgctttactgttcacgggaggaagggtgtcacggcgtcacacatgggcatggcacctgcgctggggctcacctgtctcatgaggccgtatgtcgcacaaggcttcttgagggtggggtggccatgagcgagagcgctcgcctctgtccttttcctgttgcagaggaggaaaaagtctggggccctgtttgctcagggtgggctgaggcccagaccagcttcctgtctccacaccctgactccaaaccctcactgtgaccccacgggaaagcatattcccaaatgtaactgcgacgccgcagcccgggactgctgattgaatgaatgagtattctcctttgggtttcccacagaagttttcccccagttccctaccatgatgggttgtggctttgtcacccgcagtgagaatatgcgaatgctttagcagatgttgtgtggctcgggcctgcctgccttatttggagatatttcgcacctctgtgggctcccagtggcaggcatctctggggagggagcgctgtctccatcgtcctttgggaggatgtgggatggctgcaccgggcaccactctcacatggtctccacatcaggaagcgtatctcaccgtgtccagcattggtgtcctggccagatgctctgtttataatgatagaaaaaaaatttttcatctctgaaatttgccaccttctttcagcagcatttcacttggtttacttccttaattcacgaaatatgtgaaaaaactttataaatcttaaagatgagaaaattctaaatgatgtgtgtacagatacacacacatacacacacacacacacacacacacacacacacacacatttggcccttggacaagacaggtctgaactgtgtggatccacttacacttagatgttcttctacctcagccaccgcagagacagcaagactgcccctgcccctcctcccctcccttccccctgcccctcctcccctcccttccccctgcccctcctcccctcccttccccctccccctcctcccctcccttccccctccccctccccagcctactcaccatggagatgatgaagaccttcatgataatccacttccacttaatgaatagtaaatagattttcacgtccttaggattgtcttaataactttttctagtttattttactgtaagaatacagtgtataatatgggtaacatacacaatatgtgttagttgaatgtttatgttatcattaagacttccattcaacagtagggtattagcagttaagttttgggggagtcaaaaggttatgtggatttttgactgtgtggggcttcaacagcccaacccctgcactgtccgagcatcagctgtatacatacatattttgccgtttgtattatagtagctctgtgcatggggcatgtctccgcaggaagagggactgtcctgactcttgggcctggtggtgattgtctggggcactcctcccagagccctgactactgacaggtcacttcaagaatcaaagaacctcgactatgatgtcatttttctgtaagccctggactactataaattatgttttatctgtcataattaagactcggagactaccaagctgtcttcgaggggaaaggcctgtccctttctccagagaaataattaattgttagagtatatggtttttgaagaatttactgtaagataaaagactggtattttattcttgcatttattagtatttaatcaaatggaaagtgcactttcagcctggaaatcttggcttcagctgcaggattagactgaattattgtttaaagagtaaaaggtatagaattatatgttcaagttatcaagccactgataggttttgggtataatgtaactaatttagaacataaaatttcctgccttgtggactagagcatcggattaatcatttggaagcggggcgcacttcctctgctgcgtggccttgcggtgagatggagcctgtcgctccaggagcacgagacctttacggagttcagtgccgtcaaggcccacttgtccacagccaccggagcatgttgggaacaccgggagccgctggaacgtgtctggaacaccaggctcttccattcgggacactgagtcataaatcatcccatgtgtctcatgcaagaattcttccctgcagaaatttcatgaaacttagtctttgctaagggtaaagaggatttaattctctttgttctcagtggtgtgcaggcttaatgctcatgggtgttgactggtggccggcacatcagtggctcgtgggtgttgacttgtggctcctggcattgctttgcattagaggatagccggcctctctacaccatgacttagaaaattccagccaggcacagtggcttacacctgtaatctcagtgctatgggaggattgcgtgaagccagaagtttgagttcagcctgggcaacatagcaagaccctatctctaccaaaaaagaaaaagaataaagaaaattccagaaaacgtttgtgacagcatcactgttgaggttgtagtgccacaggcagtgcagcaagcatctggtttatctgcgtgagctcatgacgtgttcatcagtgggcagaaaaagatgggatcagacaaaacagatgctttcaggatccttcagatcaggatggcaaatgtttcctgaaatgggccaggccagaaatatttctggctctgtgatgtacagccgctggcacagctacctgaccctgctgttagagctgctgcagacaggacccagaggaggagtggggctgctacccatgatgctagaccgaggttgccgaaactggagtgtcccattgtatgcacgtgtcctaaagcatctccttccatctccttgtctactcctaccgtgcgcatacagagcccctatggtgcgagtacagagcccctgtggtgcatgtacagagcccctatggtgcaggtgcagagcccctacggtgcaggtgcagagcctctacagtgcatgtacagagcccctaccgtgcaggtgcagagcctctatggtgcggtgcagagcccctatggtatgctttcagagcccctaaggtgcacctacagaacccctaaagtgcaggtgcagaatccctacagtgtatgtgcagagcccctacggtgcgggtacagaacccctacggtgagggtgcagaccccctatggtgcgggtacagaacccctacggtgagggtgcagaacccctaaggtgtgcctgcagagcccctatggtgcgggtgcagagcccctacggtgcgggtacagaacccctatggtgcatgtacagaccccatatggtgcgggtacagagcccctacagtgcgggtgcagagcccctatggtgtgcatacagaacccctacggtgcgggtacacagcccctaaggtgtgcctacagagcccctacggtgagggtgcagagcccctacggtgcgcgtacggggcccctacggcacgcaggcttgccccgccacctgctgtccccggattcctgtcagatgtccgggtgcccagcctgactgggcatggccctcctggaagcagtttcagggccagttctgatctcaggtggggatggagagctggtgtctgggcctctcagagctcaggccccgcacatcgtcagagtgacctcaccagctccaagtgccccttttccctcagtttcattatttgggaagtgaggaggtcacaccaggctggacacgggatttcaatccgtgtgtccccctgttgcccggggtggctgcatgcagggtgagttcagggaagctctggatgcagtgagcgaggccccgcccagcctcttggtgggagtcactggcctcacagctcactgcaattcagagacctgcagtgtgaagattcttccagattactggatggaagggacttcagtgacctcatgtaagaaaggaagtcacccactggtagcctcagagagggaacctctggcagtctggctcacagccggggctagattcaaactgtatccaagagcagctgctgagagacccacctcagtcctgcaggagtccaggctctctcccaggcccccagggagggtgtttccacctggtaccttggggagatgtgaccagagctgctggagggagcgtctacctgctggggtcagggggtctccatccgcccacagtgtcggctcaagaagtgtgtgctgtccaccccaggcccagggcaagtcccacgaggccgaggctgcaccttgctgtccagggggccgcagctgaggcctgtgcagcctccccggtgctagtgccagcatggtacaggagtcgcagctccaggaggacatgcaggctgcctgccatgagaacatccctctgctgtttgcagaccgaggcccatgggtgcagaaggaagcgtgccggtgcagggcacgcagggccgatgggagatggactgaccagtggtctggaccgagcaggcagcaaagggccctgtgtgctgaactgagctgctgggacttaatgcacacagaaccacagaaccacagaacgtaatggagaagaattgggtaagggtgagtgggagataaagaagccatcagaatgctgctgagtctggtgggggttggaggtcaccggaaatagctcctcccaagttttactcagatcttcttggcagggtgcatcttagcatttgtagaatgcaccaaggaatgcctgggaagggcatgggggccctgcaggggtcacaggctgggagaggaggggcttactgccttgggcccctggacacaggtaatgcctttgcctcaggtggccagaagtgcctgtaggctttgcagaaagctactgttcctttcctgtgtgggtgtgtgactcctggacggttgccggagattgccctgaggctggggtgggtgcccgtcctggagcccccatcccacagtgctctttgtccgtaggatctgcgcacacaagggtttggttgttgaacctggagacacacattatggtgaatcccagtgttgactgattatatcattaagtgggtcacatgacacaaaaaccacacgttctgaatgtacaaattccatcccagtgcaggtggaaatttgtattaaccatggctttcttcacatggcttctttgcaaacaaacacttggtactttgctagtacaaggtccttccttggtggggaggggtgtaatcccatgtcgatgtctggacgaggagaaagaggaacttcccctcagccagtggacgagactgtccaggctgctccacagtggccacagagagcccccggcacctgctcggggcaggaattggtggctttggccaccttgcttaattgagaaagttgatgtttccgtcagatcttcttgtgttcgcacatgttacctattctctaagaagtcagtgaaacttcacccaactttagaggctataaagaatgaggttattttctgccatgacatatttaagctgaagcttcccaagccataacagttttaagaagtgacatttcattttgaacaccagcctgccacctctttactcctcatgacagactgtcactgtgcagcgcagcagttagttggttcctgaagtgccagaaaattcccaggttgtgaggagtgtgctgctggtggggtgagatgtgcgacccggcgggggcctcggcgggcacaggcgggagacccgggccagagccctgtggggtgagcgccatcctggccaggccacacggccggggcagcttctttcccttctgcaaggcagttggcattatcgcggatgttagcataggaagttctagcgggactagttaaaaatgagggaaaacatggtgttctctcattgtctttttcctagtaaactaaaggaatcatgcttgatgaaggctcaagtgtagtatgattcaatcgggcatgagactgtgctgaggtctcggatgtctcgggcctggggtcagcttgaagagattcataggcgggtctcgaagcccatgctgctgggagggccgggctgccgacgtggacgggtacagctccctggttcacacaagacttggggttccctccaccgtggaatccgtcttgctttcacgggatttggggactgtgaaatctcttctcttctaatgcattcccgttgtctagaggctggggagcaccatttgattttaaaggacagccacagtcctgccagctccatagagagagcagaggtggcctcatgttctgagcagagggtgccatggtatttctgaccaggcgggaccctggctggactcacgagattgtgtgagtccacaatgtgcttgtcagaagccaggcgtcctggagttagggtcagattcccatggtgggtttcattaccctcctagagactggcggggtcccagcctcttggaagtgtccgctcagacactgccaggtgccttggaggtagcagaagcatctcttgatggcaagtgtccattgtgacctgtgttgaagacaaggtctgtgtgagaaggtgcactggtacctactgtgtcctgatgacctgggagtgtcgtgaagacagagcagccagtgaccttctgaaaccaaaagagtggctgcccactctgcctcctggctctggcacggggacggctccagggttctaaggcctaagctggctgcactacctcccgccctcaaggacgattggcatctctggcgtgctcaggcccctgcagccttgccaaacaaacaaacaaacaaaaacaacttgtaatttttcattttatctgtattttgccattaaaatgttgttctctacacaattagctgcaggacgcacagtgtttagcctgtggacgtgtctcccagctctgccatgcaccgtgcgtgtacacctgagtgtactcaggtttgcatacccccgacactgggacattgatgtcatggaatctcttcatatagatttttctttggtctgcagtgacatggcaagtggtaaagccttttatgaaacctcttaaagaaacagatgatagttactaagaagcttccaaaaagactttttttttttttttttttttttttttgagacagagtctcgctctgtcgcccaggctggagtgcagtggcgtgatctcagctcactgcaacctccgcctcccgggttcacgccattctcctgcctcagcctcccgagtagctgggactacagacgcctgccaccatgcccggcttatttttttatttttagtagagacggggtttcaccgtgttagccaggatggtctggatctcctgacctcgtgatccacacgcctcggcctcccaaagtgctgggattacagttgtgagccaccgcacccggccccagaaagacgtttataggctcatcttgacagtgttctggtatcacaaaccaattgtcagttagagctagagttggtttagctaaactgtcggaatggatatgggagtggcagttataatctggaaacattgttccaaagtgctttaagttccagggaatttttggagcaatttgttaaaactgtacacatttacgttttctgcccttttctctaggtgtgatctatttctttcacacacacacacagcagtttgtatgttaactgcttgctgactgatttcctgcttgattgcacagattcaaagcagtgcatgagcttcagaacagcgtttatcttcctgcattactcatatttagttccatatatgtaccaaagagaagagttcagaaaagaaaaccagattttattttaagtatgatttttaaatgtagacaggtgccagtttatatctcaaaatgggtgatttaaagaccagtgaacagatttccttagatgtccgtctgcttctgggatctgatgtgtaggcatcttcacgttggttttataatgtgccacgcgtcaggtgttatttcgatgactatgctgagccctttaataagacgcacgtgcctggggtgcttctggaaccttgccaccagggctcattctttgaccatccctaattccccagggctcttgttgttagagtattctttacaaccaaagcatcattaatcagaaaggtgctgtgcggtgcggggccggctccgatgacagtaataaaaaccggcacacctcctgttccaggacccagaccctggaagtctgtgcctaagccaagacatgagcagcgtttgtggaatgcggcttcagatagaaaccttctttcaatttgcaggcctggttatgtaattctaatgcagaatctcccccttcgtgtttgcatgcgtgtagccgggttcacagaactttagccacaaacaggagtgtttccctttttccagggctcccgtgttaggcccccaccaggaggctttggggtggcgtttgggaacgccgtttggatcccttctcagtttgacatcctaggtggcagctccagttttgtttggtgaaacgatttcaatgtaacagaacccctttcggttgtgagagcagaatgaactgagccgcacttgactgtcttgtgctggatgtgacccagccgaatccacggggagacccctggttacagcggggaccacgggtggggtctcagccgtggccctttatacttggtgagcatcagccacaccacgtggccaggtttatgatcaggtgatagggatgaagtgtttttgacacatgcttttctttttttaaattaaaatactatctcatgcctgattttgaggtgggctgagcatgagtcctgaggatgagaggggcttccccaatgccccttattccctgttcagaagggagattgcaaagctagttttcatcttgtgatgtctttgtgggaggttgtgaggcagtcagacacggtcctcttcctcccccaggtgagccaatctcccccttcacacagacccgaagcccaggccacaagggacctgggctaccttgtttgtaaacagcttacaaggaggctggtgatttctcccttttaacatgttcgtttttatgtttttgaggtgtggtctcactgtgctgcccaggctggtctgcaactccaggactcaggcgattctcccacctccgcctctggataggtcggaccgcaggtgcacgtcaccacacccggctagtctgtttctgtgtgttttcattgcacaggataccagcagtggaaatggttaagagggaaagacacagagctgcaaagatggtcctggaaggacggtttttagacctgacagtttttagtgcagcaggcctggaaaacgactaccagtaggggaaaaagaagagtttctgtttctgggtctcttccttttaatatggcaggaactggcctctggcgccaactgcttaattcagaacattgttatttaaacgccattcatgttaaaagggagatgaaacgaaattcatttttccagaggtctccaaatagccatgaaaaataaatttttttctgccaccaagtaccatcagccactcatgtggtttaggtggatgccgtggtggtgccgggagcactaccagcctgtggggccgtgggcttgtgcttcgccggagtgggaagtggggacattaggaagcccgactgttgaatcgcctgggcgtcctaaatgtgggctgtgttgtcgtccctgtgcaagcctgagaggcagacagcactgagtccactggatgcctgcttgtctggttgccccttagactatggtactctcagcaacacggctgtcccattatgtgcacatgccctgttacagcttttggagccccccttaggaccgatggttcgaattctggaagtcctaaacatttgggtcttccacgtcgctgtttattctgcagatttgaggctggcgtgtttgagttagacgggacactggggctgcccgctttcctttgatggtacgccgagggcctctctgccccgtgtgttccctgaggttccagtgggctgcttcagggaaggcgggccgggaattcctctctgtaagacaggccccgttttatgcagctgtgaaccttgtgcttgggtgtagtaggtggtcggctcttttcttttctcctgttcacagcacgcttatagccagagcagactctatggtttgcctggagagagcttgcacacacatcgtcaccctgtctctggtggttgtggctgcagcctcccagacgcctctccctgtccccacccttgacacgcctggaatccgtgttctccctcgtttctccgacttcatcccaggacttggccctcacggctccaggagctgctgaggcagcttcatctcaaagccaggtcctctccctcctggtgacctggccaccaccttctgctccttaatgctctgtgctgcttccagcgccagtgcctttgcctgtgcgcacctgcctgcctcagtctctcctctcctcctcctctccacccagaaaactacaacactatcccttctctctcagcacctcctccaggaagccttcctggactccccaggacatccaaccccttgatacaggctctcattaatcctggagttctccttctgaattcctatctcaattatcattgcatgattcatataattagatattttgttcaacatatatttgctgagaaatcgtgggtgccaggcactgttattctaaatgctggggatacagcagtagatcagctaagactactctggtttgaagaaaaaacaggaattcctcagaacacagacttgaaaccagcccaacgttcctgttctcacacaaggagaagcctagccagccatggagagctgcagtggtatagtggccatggagagctgcagtgtagtggctgtggagagctgcggtggtgtagttgtgcttctctgagaaagtgacgtctgagcatggttgtgagtgggatgacagtggccactgtgcaggctgggaaggagacagcagtagcacggaggctgtgaagcgagagcgaggctggagtgtgaggggcagtggcggggggagcgggggcgtgggtgcgatggggtcatgggggactgaggccagagaaggaagtgtggccctgccgaatttgggaccatttgggctagggggcccccaaagagacctgccgtgtggagactagccatggagaaccgtggtggcggagtggccgtggagagctgcggtggtggagtagctcacagtgttgggccctgatctgtcaaggcttttggccttttcctcatgatcactaggtggttgccacagctccagccatcacatctgccatgtcaaggaaggaagggtaggggatggtgccatctgactttagaaaaagtatatgaaaacaagaactctctgcaggcttctcctcgctctttggctacagttgtgacacatttgctgcctgtattggagcttacattctagtgaaggtgacacaacaagtaagcaaatcacgtcactgtgattccaggtcatgtaaggaaaataaggcagagaaagaaggggtggaggtggtgactgttttcggcggcttctctgagaaagtgacgtctgagcatggttgtgagtgagatgacagtggccactgtgcaggctgggaaggagacagagcggtagagcggaggctgtgaagcgagagcgaggctggagtgtgaggggcagtggcagggggagcgggggcgtgggtgcgatggggtcatgggggactgaggccagagaaggaagtgtgggcctgccgaatttgggaccatttgggctagggggtccccaatttttttggcaccagggaccagttttgtggaagactaacttttccacagatgggagtggggggatggtttggggatgaaactgttccacctcagatcaccaggcactagattctcataagaagcgtccagcctagatccctcccatgcacagttcacaataggcttcacactcctatgagaatttaatgctgccgctgacctgacagtaacgctggctcacccgctgcttacctcctcctctgtggcccgtttcctaacaggccacggactggacccctggtttaagccatatccacaggaagtgttttctcatcgtgatggaaatgaagggaagatgtgatctgatttacttgtgtgtgttttcattttattctaatctttatttttttaactcagaattattttacacctcagtttttattcagaaaagcattaaccatcatttgttttgcatataagacatggtgagatcacaataagtggagaatgtttgccatcgtttttctacttgacatcaacagtgtaacattagcttttttttgtatgttatatttacccatgtattcataatttggggtactctttatttctttgtatagctctcatttttctttttccttttttttctttctttttgtggggacagggtcttgctctgttacccaggctggagtgcagtggcactaccgtggctcactgcagcctcgacctcctgggctcaagcaatcctcctgcctcagcctcccgagtagctggaactacaggcacatgccaccagcctggctaatgtttttatgttttttagtagagctggggtttcgccacattgcccagactggtcttgaactcgtgggctgaagtgatcctcctgcctcggcctgccaaagttctgggattacgggtgtgagccaccatgactggcccagattggatattaatacagtttttttctccttgaaaagttgactcgtactaactgtagaaagctgagagaatgcagataaaaaaggaatagtttaaatcatcctaccttatttgattttttaaaaataaactgattttggaataatcttagatttttggaaaagttgcaagcaacgtatggtgtggtttactttttgtgggtaatttttctccccccaggagatcacatttgtctccttccagtttctggcaccttagcccagtagctcctgtgtaggggtgctaaggcattggttaaacgtctcttgatcgttcctggtttgtttcccgttattttgtctcccttttgcttctcccctggttgggtttctcctcacttctcagtgggttatttccacaatcgaccttggttctggaccagtcttgacagagctgccagagggagcctcgaaatgcaaaccagctgcatctcctcttgttgaaaactctgtggcttttcagggaaaaggcagccagcaggaccggcctggccatggcggcctcagggcccgagggtggctgtgtcccccacgcctctccaggcacaccaggcctcatcccccagctctcgtggcgggtgccttcaccctggcctgcgtggctcctcgcccgggggcccctccccatagttcagttctctgtgtaggtgtcagtttctccataagctctcagctgcccacactctccccccgaagtgtggccccagccctgcggagtggttccctaaccgccactctgcccacctcgtgctagcctgggtgtgggcttgcctgctggctctgggctcaggctggggtgctgtcagggttgcaggggtcacagtgaatcttcatcttccgtgggccagtccccttcccagcgtccctcctggggctgtgggtctggcctcccccgttgaatggccctctcttgaggttgttgggcattggtgaagatcctgatggggtctcatcactggagtcagacgtctttcttcctgggtctggggcatggcggtattactgtgcgggctgttgggagagggtctgttaccctcatggctgcttgtgacctgtccaggccaccactgtgccagcctttgtgtggctggtattgtggcttctaagttgagcctccgcctggctgggttgcgatggtttcactcctgtcaggttttcatgctattgaaactcacttttctcactgcctgatttctgccttttgtgggtccctcctggtgtccgtgatgccctcatttagtctgcaggcatccccccacctctctgctcgcccggtgtgcacacctgctaggtcagccctgggcatcgcatcagagacgctgccgtgctcggtggcctggggcttctgtcctgtagaggcctcagccattgcattttaggaatcggcactaaactaacttctactgctgcccacagaagaactgtgccaaatgctctggttgtctaccggaaaaaaaggtagtatgcaggtttcagtggcatatcaaattccatttctgtgggcctttgtgggaggcttgctcttagcgggggctggtgggggtgggggggggtgggggtttgtgggggtgggttccagctcattgttgtgttcaggtgaaatgaggcagggctttattttgatcctatttaggttgtaagcaggtctgaggaattcacttcctcatgcttcacatacctaaataattagccagttggatatggacaggagctggaatctgttgctcatttgtaagccagattctgaactcattcattgttgcagttataaactggttgccttttttcggttcttggaatgatttggatggagctcacctggtccccccagctccctgctttgtgattgattcagtgtgttcccatggcttcaggccacctttgctggtcaggggagctggttcagagggcttgaggccagcctgccctttggatgagaggcccatgccatgatgctggtcatggggatagcaccacagggctcagtcggggatatgccagagctttagggtcccttgggccagcagctggggtccttgggcatttcctgggtggcggtgctctctggggtgcagagttggtcattccagggcaggcagttcacttggccacaccaggtttggctggaagccttctccaccgcattcccaaccgctggcctcccaagtttggcttcttgtggtcagggcccagaccatgataaccttgaggactcctctctccgggagactgtcggggctaagctgcctgtggccctccaccgccctgctccttcctccgggtgggggacaccccatcccccatgcccctacttcagcttgctgggattcacccccagtggccttccaaggctcctacctttctccctggccctgtctctgcacactccaatgtcttcccctttggctgacgcttggattgggggtgaactcgaggtgtggtctgtgcagaatggcgtgacagcccttccagcccgtcacggtgtgtagtgcccaaagccctggccgtggccatctcaggttagaccctcagagtggcactgtcaggtagaggagtcaggggtcttattgatgaggaaatagaggcttgagagaggagtgcgcagctagtgtctgaccagcccccacatggggcactccccagtccgaatgtctgcagtgcagcttcaggcgctgatgtgggcaaacccttcctctcccaggccgtcccttcctgcagctgctcggacactggcacatgttggcaggcgtcagcaccagggctgggctcctgcctgggactcgaatcgggagcaggtcccacggaggcagagcagccgagaatcaacggtggccatagccaccacatcctgtttccaggggcaatggtggcaacagtgccagctgccctgcctgctgtgcctggttgccccacagatgtttcctgaagcttgattttggctgtgattggagcgtggccagttctggttcctgctattttctgagcctgctcctccagccttcccagaagttctttgagttgtggagtagcctttcagtaaacggcatttgtgcttaaattagcccgtgtcagtttctgacacctgctgttaagagtgctacctgatgcaggtgctcggggctggccaggatccccacctgagtctggagccctgagcccaggcctcctgactccgacagcctgcagccctgcccgaactgggatgatagagcagcaaacatggctccatggagagcgaaacccaagctgggctgtttactgccagtctgctgggagctttgacccaccatcgtgcagggcgagtttccaagaaatggcgagagagcatccagatttctcacgttgcctctagagccctgttgtctgaccagtatcttctgtgaacatactttgggaaatgatctcatggacgcttggcctggatggtggtcacactggtaattcagttccacaagtattttatgagccccttgtgtgtgtgatgtgtgctgttcttcagggagccctgagcagagctgccagcatcctgcctgagaagcagtggcccgggatggtgggagatgtctgcaggcgcagggcggaggctgtgggccaagattgtggctctgagaaatggagatgggagaaggggaggcagtcactttggaagaatgggcgggatggtgatgatttgaatgagacttgggggagttggggcagcgtactccaggggataagatcagaggtgaagggggttgggctaaaatgttgatcatggtgggaacagtagtgatccccaaatcctacagagcctttgggaagcctggtctttgcatacgttccctctaaactcgtgccgacgttgtgatttggtctgatttatcctacagacaaagacagttgaagcaccaagagtgattttctcacagcaaagggacagagggtgggaggccgtgatttgcaccccctgcctttatctggcccctgccacatggtaagtggaaggcaggtggctccttccacagggctctctttgccctctcgggaagcctggtttttacccttgaggcagcagggaggctgcagggtgagatgttgaaggagtgtgatgtgggcagagcctctgtgatggggcatggtttctggcacatcccatttccatattctggggtgatcgaatgggatccggttcaaatccctgtcagtctgcacagaaaaggggaggttttgcaggcggctctggagtgtgacagttgaggattgaatcttgagagtaatgcttctacaaaacacttgtgtagtttgcggtccgctgcccgaccctggtccctttaagggacataaatgcacctctctctcctcgttcttggaaagacagatgagagaaccaaagagtggccttagaagcatatgtaagacacagaaaggaaagatcagctggagtgctggtgaagggtttcacaggataggagaccaggcagcaaggtgcccagcggacaagcagggagggggccttcagtgaaggcgcagagatttgggatgcatgtgggattcagacctgcttcattgtgggaacagagcaggaaggtgccagtgagctgcccttccaggggtcagcagacctttctgtagagggttccaggggtccgcaggccttttctgtagagggccagagagtcagtgttctgcgcttgcagggccacactgcctctgtcacaactgctcacctctgccactgtagcacggaagcagcaggagattgtgtgtaaataaatgaacacaattgtgtctcaataaaactttatttacaaagacaggtgcagtgagtgagctttgccccacaggctctaatttgttgcccctgctccagccccttgatgtagggagcctttgctttgttgttctcagtgaactttgagggctgatggttgggttggagtggaaagagcccaggtgtgatgggagccgtgaggatggccttccttgagtagccacgagctgctgtgggtcttcctgagaagctgtggcaatgggaggacagaggtaaaatagcaagacccagtgcctaaggaggctgaagagggaggatcgctagagcccaggagttcaagactgcagtgagctaggattgcaccgctgctctccagcctgggtggcagagcaagacctcgtctctaaaaaaaaagaaagaaatgtacaagtgtaaaggtagcctatagatgtgttcccctgtattccccaggctctattcttcagcctcctgagcagctggaactacaggtgtgtgctatcatacccagctaattttaattcttttggggcagggtcttgctacgttgcccagtctggtttcaactcctgagttcaagtgatcttcctgtctcagccttccaaagtgctgggattacaggcatgagccactgcacccagacttgtacatctctttaaatgtaaattaaatgtgctttccacagcattagtggaacaccccagcattgctcatcctctccgggctggctcctaacacaggtgccgtggcataggtgctgagttgaatctctgtttttgtaagtcattgcatacatgcttcattctaaaatgtactttattccaaatattgaacagtttgtcttcgggatttattgtctgtggtagttgttttattaattgttttagtaaaacaaagttagcttagttgtgggaattatttaaaaggagctcttaccaggtcagcttccttcggtgttgcgttggttaaagataaacgagaagaatcgggatacagtaattttaggaaataaaaggagactgtagtattggttggctgctctaggtaatggtggtaattttctgtcttcagagtaatcatattgtgaaaatgatgcatcgtataattccaaaaatgaggaagagctttggaatatattttgtgtcttaaataaccagtacttctgttgtgtgttttatatacgaccagcctcttacctatacactttgtcttaaaaattatttctgtttaggtacttggaaaaatggacaaggattgtgaaatgaaacgcaccacactggacagccctttggggaagctggagctgtctggttgtgagcagggtctgcacgaaataaagctcctgggcaaggggacgtctgcagctgagtaagtatgagcccacgtgatcctgtataccgcacatgctgaagcaaccgaggagtatatgtgataacggcatgttttccattgatggcagggtaacgcatagccttacccccacaaccgcaaccacgagtccgtctctcaaaacagtgtgctgcgacggctcctgcatttgcagcttccctgtgtgttgcccaggagctctccacctccgatgaacccagggccgttcccttcataccctttcattagtagctctaagatgtttgattaaggtgtacgtttacagaggagttggttggtgatgagcattgaacatttgggttcttcggcatatgtctctggaaatttagagacagggagatgcaggattaatcttgattaaaaaaaaaagcccagatcagcgttccctgttcctccagagtctgccaggtgagtttcatactaggactgcttgatgttctggaatcccttaaccaggagtcccagttgccttttgagagccgtggtcagacccttggcgagggtgtggctgaggatggccctgccagggggaagggcccgaaagccccttttcagcatgactttaagttcttgtcatttctaagagcgtacatgtttctctttttgtgaacagctcccactatatttctctaattgcaaaaacgtaagaaatgtaaagcattccttagtgttttgctttgaaatgtaacatttaatttcctccgttcattctattaaaattgtagctcttgttatttctgaccaaagaagaagaagaaaaaaaaaacacccactcctatgcttggtgtttctcttaactggctaataaacacaatgccaagaacattagataaagaaaatacataagaaacataaaaattgattttaatgggcccctgtccgagacagccataatgagcacaagcgcagtcataaatatcagcactcgcctccgctgtcgagatttttcctgtagagctgcacgttacaatcaatatagtctttttgagaccaaaaaataagcaaacctttgaaccatgtgaatatactcttttcagtttctatgagaaccatctggctgtagtgttcagaaagtcacaggcaccaaataatttgtaggggaaaatgtcattttgtcttttagcatgttcagttgcacaataaatcatagaaattatgtgttggttttttttttcttttgggaaaaaggtacaaagtgaatttggggaagaaaaaggaaaacaaaacaaaacaaacattataagatatgtttagttaaatgcccattgtggattaggcaaataggatgaagacgcttaattttgaatttctactttatgaactttctgaatcaagttaggatcaggttcaggtgtaaaaacagccgtgaaataatgctaaatcctgaataggatctggctgattgctctcatgaaaacacacctgtggacaaaccatgggagctggggctggtgccttcatggcccctgggaacttgggctcctctgagcttggggtctccagatggtggtccctgccctggtgcttcaagacagctcctgggcctctgccacaggtaggggagaaagaaaggagggcgtgtcatatatgggctaaaattaggtgtcttgtgagtaaggaaggagtgggatttggggggcagccagcagtatttgtgtgtagttaattttagtggggggagcatttaaaagtttgagaatagtatataaaagtatatgaatagtcaattaagtttaacattttatcatttttaaaatttaggtaaaaattacatagaagtcagatttcaagtgtacaattcatttgacaaaagtgtacaaccgtataactaccgccgaagatatagaacattcaagatatggaacattccagaaaattcccttgtgccccctaaagttagtcctctttgtgaatttttgtttccatttctccagagtaaattcctgagtgtggaattgctgggctggatggcaaatgtatgtttaacttgacaagaaattgccaaaactttcttcagagcgggatggaatttccactagcagtgtgtgagtttcagttactccacgttcttggcagcacttggtggtgtcagtttttcagattttagccattctggctggtatgaagtatatctcattgtggttctaatttgcactttgctgatgacttatcctgatgaagtcttggccattcctatgttttctttgtgaaatatctactcaagtcttttgcccattttttttttttatttctttgagatggaggcttgctctgtcacctaggctggagtgcagtggtgcaatctcggctcactgcaacctccgcctcctgggttcaagcaattctcctgcctcagcctctggagtagctgggattacaggcacgcaccgccacacctggctaatttttgtatttttagtagagacagggtttcaccatgttggtcaggctggtctctaactcctgaccttgtgatctgcctgcctcggcctcccaaagtactgggattacaggcgtgagccactgcgcctggccaccttttgctcattttaaaattagaggtttcttgtttgtgtttttgttgatgttattgatttgtggttctggatgtaagacttttgtcagatgtctgtattgtgatgattttctcacaagttggaggcctgcttttttgtttttccaatagtgtcttttgatgagtagaggttttaaattttgaacaagtccatatgtctttttttccctttatgtttaacactttttgtgttccctgtaagaaatatttgtctactgtaatgtctgaaataaattctcccgtaatttcttttaaaagctttgtagttttttttatgtttagatatatgtgatccattttgaattacctttttgtgaggtacagagtttattttttccctgtagctatttagttgttttagcatcatttgttggaaaataaaaattgtctcctttcttcattgaattaccatcagttgaccaagggtgtgtgagcctgttcctgttttgctctgtttggttcagcctacctttgcctgttctatgcccgttccatgctggcttggttaggtagctttgtgatacatcttttgttttgttttgttttgttttgagacggagtcttgctctgtcgcccaggctggagtgcagtggtgtgatctcgactcactgcaagctgtgcctcctgggttcacgccattctcctgcctcagcctcccgagtagctgagactacaggcgcctgctgccacgcccggctaaatttttgtatatttagtagagacagggtttcactgtgttagccaggatggtctccatctcctgacctcgtgatccacccacctcggcctcccaaagtgctgggattacaggcgtgagccaccgcgcccggcctgtgatacatcttgatgctaggtaatgtgagtccatgaatcctctaaatttatttatttttgaaaggtttggcttctatgtctcttaagtttgcctattacttttagaattcaggtgtaaatttctgcaatgattcttttttggatttcgactgggagttcattgaacctggttgtcaattttgggagggttgacatcttgatactgaagtgttcagttcttggctttgactggcgtctgcatttgtttgggttctttcattgtcctcggcagcgttgagtggtttttcagcctggaggctttgcttatctggcagactccatttctaaatactttgttcttgatggtattctaaattaggttgaaactttttaaccttttaatttattgctgcttgtgtttaacaactgacttgtatgttgatcttatattctgggatcttgacttaattcatgtattttttccagggttgttttgagattgcttaggattctgtataaaaattcatgatgtctatgaataaagacaataggcttcttcctttctgattgttatgctttaatttcttctattgagctgtccagaaccctccaggatgacttcagtaagtgtggtgacaacagacgtccttccctgtttcctggtttgggggagcttgcaggatttcaccagtgaggacttgctccccatgttgggtttcagaggcgtcttcctcactgtgtggaatttttgtcaaatgatatttcatgtatgtgttgacatagtcatgtgctcttgctcctttattctttaaatttggtagaataaatttttagaattttaaaccaggtgtatacttttctttttttggtactgtctttgtcttgttttggaattagtctcattctgatgacagatcaatttggaagcattccctcttctattttctgaaagagttaagtgttggattgatattactttatctccaaattttgggatgaatgcaccttggatgccatctgggtctggtgtcagaagccttttgtgaagcttcctggtttagtagaattgggtgctgccttccctcatctcggggtgctcccacctggagccatctgtgctctgtgtggctgctgtcctctggttgctgagtgacagtggctgctgggatttggggcagcatcctgctggctctggcccctgccctcacccttctccgagtgcctatgagtcccagggtggtccttgcttcctctgaatgggtgtttctttagtagataaattacaggttgaccactgggccttcttcagtgacattgcatctgtgcttgtgtacaaagtgtgattcccgctccccaggtgaatccacttacctgtgtgtggcttcgcacggggaccaatgacttccttgcatagttacctttccctccctaaaaacgtgtgagaagcacatcagttgggaaagtggtatattttccaaaagggaagcaacataagctgcttttaagttagtttcataactgcctgacagtatcaggtttctgtgaatgccatcacgtccaggagcacttggcctctgcaagagcggagcagctcccccgcgccatcttcccgcagctgcagagctctgacctcgtcagattccctgcagtgcccacagtctaatgagaggggccaggctgtatgtgtttacttttctaatgttattttggggcttgtttagttttccataatgttgattgccgtatttgattacttgaaaaaatggaccgtatcaccctgggtcatacttagattacaaaaatagtagcagtaggacttgtagatcttggaagctggggagctaagggggctcatctttcacttaccaagggcttacccttgtttttcattcttttatttttttcacataagccttttcagaaaaatataggaaaagctgatagagtccaattgaactaaaccactttaaaactttttgtattttggaaaatgtggggactacacacagactgtcttctactgcagaggctctttttctgtcttcatggtagggatccatttacagggtttgtgggtctgcttttggcatctggcccagccagcccttggattgaggctgggtggggcatgcaggttggccctgaccctcttctgagcacctggctggctggacagatagggccttcagtcaccagctaggctggcctgaccctagaccctctggaacgtgagaacgtatcctgccgggcctctgtgttgaacctgggaggagagttgtctgatgtcattggatgccctatgagtttctgccctcgaaacgtgccccatggaaagcgtgaagatgcctttgagcttcccgaagggcagctgcagcaggaggtgacctgcgttttgcctctctcctgctcatctctaaatgtgttcaggaactcagtcgaccctcagccgtgcatggggtcccggctggcttggtatgtgcacctgccgagtctgtgctgccagttatccccacggcctctccgtgcaggtcggtctgaccagtgccagtcggatggttcctcaaggtccacgggccatgagaaccttcctgggaacttcacgaattcgtttttttctgacagattgggaaattaatacagacacttgccgcattcacgttactataattgatctttcaaggaggagaagaaactgttcttaaggacaaacacttagagaagcactgccagtaaaaataacatccaaaaaaacgcgctctgtaggacttttacctgcggcaagttcggctgtctcattgcttttcctcagtgccgtgaaataatgatttgtgttgtatgtgcttaaaaaatgtgattattttactttatagagtgttccttaaggaggtctcttgagtcaaataagcatgtttctgtgaggaaaacttgccaggcgctccttggctttatagaaatcgtctgtttttcaaaaacgaatggctgaatgccctggcgagcctggaaccccttgttcttgcccctgctggctctgcgattccatgtcggtgaggcctgtccacgctgacggatgttgcctcccgtttctgcctgagaggggtaaatgatcagtggtggatagggagttcctcttgtgacttatgttatcaataacacaaattgtgcatatacttcaccccatgctaaacatttatagtgcagtgtcctttagaagccagacaatggcctcgtctttcaggttgatggctaaaaagacaagacaggaagccaaggtgtttcttttcagctccacagatccttgtgatgaattatgttccgtgacgagagggtacgatgggggccgactgctggcccccggacacacagtgctgcacatggggcctgcagaggtgttagcgtagcccgtgatggtggcagctcttggaccttagtaaaataaagggaagcagcataacatatgcttttaagtgagggtatggcgtgaaaaccctgccgttgtgtgataggagacgggctctgcaggctgagccttccaagtcgtgaatgatgaggtttgctgtgctcctctgattggcagctgaaagggcaggtcagagctcctctctacagcactgcggagaatcccaggctgtggagcactggcccatccaccccaggacagagctgcctcgccacagaagagcgaggttctgggattcactgtgaaattgttgtatggtttctgatctagaaaatcaaacctaaacaatgcgcaacctcaccagcttcggtgctcttgatgttttctccctgcagctggttctttgctgacctgggggcagagtagacagtggtggcagccaggtggatagtatttaaacaagtgtcactgagatttagggtccttatgtgctggactcatctaagaaaaaaaaaagcaatgcaaaagttttatttctgtcaattttgtaactgtgttacaaggagacagagatggcaaacgtgtgtgcctgtgtctgtgagtcagaagcaaacttgttcatttcatttaattttaagtctgccaggaacttcttggaaggaagaaaagaatggttgaatgacagctacaaataggtgagttcagaatatgatccaaagtgtcagagcaaaagattttttaagtttccaacatttggagtaaaagagcactttagagtaacaggtaaatgggttaacttcaggcagagagaggtggatgtttctgcctctctggtatgttaaaataaaaccccttaaatcccctgctcttaacaataagtttccatttaagagtcattgggcttcacctctgttcggctctgtttgtgaagggagggcagcttttctggggagatcatgcccctctctcctttatgtggccacagagatcctttccctgttttcatgaggaggaaacatggaaccttggcacaatccagttctcatctagaattacattgtatgctgtgcaggccaggggaggaaagatcccggaagtggcagccaccggataggcacgttgccgccacagccagcatcggcgtctgttcaggtttcaggaaggtcacttcttggctcaaatccctggtatttccaggttgtcttcagactgcggctttcaccctcaggaagccccagcatggccttgggcccagcttagaggcttgtgggggtttgggtgtagccccgtgcacagtatcctgtctaggattcataatcttgcaacagccatccctgatgggattgggtaagatgacagtgtcctttctcgatggccctggtgccctgtggagttgggtcctggccctcactaccctgttgcgtgggtgggccacgcccctcctgctgatcagcctctgttgcagagagtctggccctgtggacccctgcccccggccccaggccctgtgtctgcgctgggcttgcattgcctgcctctcggtcccctcgcctcattgcagtttggtgcttctaattagttgtggtcttgaaaagctggtgaacaggcttgtccacattgtatgggaaataaggttcaatgaacccctgtgagaaacgccaagtgtgggatttctgacagtatcccacagaaacatctcagagcccatttctgtttcctcctggagtctctgtttctcccagaagaggcggcgtggccaggggtcaggcagatgtcaaggaagtgaggactcggagggactggcacctgtggaatagcccctgcttcgtctgtctggcctggtgggaggaggtgtccttccgtcactgcacttcgtccttgggacccctctgtgaagttgttggcatcaatgtgcgtttaccaataagagaaatggagatggggtgagggatggtgggttacaagtcctggggaagacttcagggaagaagtgggtattccctctacttagctgaacttgcagtagagactgccactctgggagtgacttctgttctcctgtgaaatcctctgtgactcttgcctgcagttgagggagcctctgagaccatcctgattgggatttggtcagtgggaactcaagtcagtattgtcctgggggcctgagtgccagtgtcttaaaaatagagtgtcctccaggtaatgttggatttggaagttcaggctcagcactggatttgtcctcgtgatatcactcgcctactgtacacatgagtcattgtaaagttacgacatgagctcgcatacgtgctggtattagagctccttggacggtgatgtgctgttttagaggagaaaaagctgagatgaaacaaaaatggtggtggcagttacccagggccacgtctgtggatgccatcctcaggatgccattgcatctcgggccagcctccctctgcttttgcaaaagcacaaccgtctggcctctacgaccaccaacacacacctctcatactctggaatttgatttctggaatgcttttttattcttcctatatctgtaagattttctgatatttaaactggctgcaactaatgaatagttttcagttttgttttaaaagtgttcatgtcatttaagctctaaactctcacaatatacttggtttgttaaatgtaaaattttatcagtaattagatcagctccttgatattaatgtacagggtagctcttgcgtgctgatcagttcagaatttaaattgagttaaaggttaaatgagtttaatttttgaattgaactgaagcattgtcttgtggcaaattcatccagaatttttatttccagttgctgtacaagtgacggaagtgggtctttttgcgataaaaacattgtgaatacatttaggattcagtgagcttctgtcatttactcgctcattctctaaacgtgtgagtgccctgctccgtgtcagaccagatggcaggccctgcatggggtggggaggggccagaatgtgcagccccacctgcagcccaagcccagctcaggggcagacaggggcagacggggaagtgggctgttccacaccttgagattggtgaattcctcaagacagcggctggcaggggcccaagcctaggtgactggccacagagctgaatggggctgaccgagttaggacatcactgggtggtgaaccaggaggccctggctgctgacaggatgtaggggcatggaggggtagcagaaggaggcagttaagaggctgcgagccccctcttgggcatctgacggggtggtgcttcctcccagggctaggggagaggtgagcaaagaataacctcaggaaaagaaataaaagacctggaggaacagtttaacaagtgggtggccatgaagagctaccaatggagactgaaggaaaaccaagaaggaccagagagagaatggagccaggaggctggaaggagagaggcgggttttgtgtcaggattgcccagagctccccggagaggagcatctctcctctccatggcagagcacagagggtggaacactgacgtcagatcttcttcaggccctgaacgtaagaattccttggtacctggtctgctttgagactgacatgctgtgtttgattagtttgacttcgggatgccagctaaatgctgtttgctcagcatatgcctgaactggaaatggttccatcacaaaacaaactgaatcaaatagaacgtgggggtggctcagtggggacacagagccagaggtgagtctccttcaccccaaacaccccaagttctagatttgttcttggagctctgtgtcagggttggggtggacaggagggagagaatatcctccgcagaaacacagtttatcacactgcagaattcttagtgttcttctgacaaggacgtttgttcagtttccctctagactgggccatgctctctaaatagaactgaaatcatagttacaactcaaaggcagttgagagaagagttctagctttgttccataacgtcctgtgtcttgatttcactgtatctgtctgttcatcctgctgggggcgttaacccacctcttctcgtacagggtcatctctagtttcactgaggacctctgagaaccctagtccctctgtccatacacatcggcaggagactcacctcccccctttcctcctgtaccccatctgatccacatgcacaaaacacacacatgcaaatatttaaaagtagaaaggcttatggactgtatgacttcagtacacctgcagattcatggagtggttctggagaacattggtccttctgccggcctggcagctactttaatttctggtgtccattggcagaatacaagctcatagtgtgtgctgggggctgggtggggcaggggattaccgttttcttgcagtgattgttcttgatggaatccacattactgctttcaaagctgcttttcctgtgccttcttccagaaagctatcctcccgtccttggttggctggggcaggtgaagcattaggaaatgctctgtctctgcattctcttcgagtaacactggggagtgttcatggcttctggcagaacagcaatgttagccttcagctgctgaagcaagccttctgctcattctagaggcatcttctaaacagatctgcactggtcaggtggggctggagaaggactgggctgagagcacagctatgggaggcaatacttgttcttgttcccaagaagctgatgtgtcgtccggtgaggtctctcgtcagccgaaggttggcacaaggtcgccaggcaagggctttttgtatgtgaagtatgcacattctagccacagagttttctgccagggtgtttagacaagctaaaagtggaatataaactgtattcaatttgctaggttgcaattataaggacaaacatgtttttaagacttaacccattatagtaggaaaatacaaggcttggggtatgctgactctttcccttgttcgtctctcaaatagaaaaatggtgtgtgtaagtaggtgtttgtatatgtacattataagacattctagaaatttctgtcctatttctttaatattcttgccactaaaaatatatgctcctgaaactagggaaaaagaaactgtttatcattcttctgaattattacagataccccaaaagtagcctcctccaaatagtggtttttcttttctaaaaatcacctggaaaaatactgagctttctgatctttattttatccttttcagtggctctgtttggaagagttattgtacaacccagcactgcttttattaaaaagaaaactgggccactcatttccttcaaagtttttggtgtgtttaaatcttctctaggtaaacaaaacttttattgaaaataatattttgagaccgtgacacccttctcacaagaagcggtgctgaaagcccccttgttggctggtcctgcaggcagcctggcgtctgctttgcctgtgggccgtgcagggtgctgggggcagtggggagaggcgtcagtcccacctgcagctttcgggggggtgctggggaggcagatttgacatgaacgcaaataagtgcaaggaccatcagggcaaagagacccaggagaccaggccaggggaggaggcagagagcctggtcaggccaggctggtcctccaggtccaggccctgcaggatcctggaaggcgtgaagatgggctggaggtgtgagcaccaagaatggggcgcggcctgaccttgggtctctagaagttaccctgtggtggcattttctataattgatgtcataaatagctggcttctttgttagaattcatttacttactaagtttggcaaatatgttgaaggaaagaaatgtgagtgtgtggatggatttcagcacgttgacatcagtgcctgtctccttggtgcctgttggagacaccgtgttggaataaggatgaggttcctccctcagaatggttgatccatttccttcagttcttcttcagttttgcagcttttctcccctaactgtagcagaccatctcctggaatctcatattaaaggcataattaatcatgtgatatcctctcgttttttgcatcagagttttcaagagccctccagatttttattgcctgcagatccgtgtgcttagacatagtaccgtcagcagtaaactggcttctggagaagaaattgacaaacaactttatagttgcatttttagccttaatatctgagggcgagaagaatgttcaggatttatgaagttcctgaatttaaaatataagcaataaaatgttcctaatgtggggtccccatctgcatctattattacaaactcttaaagtcactttagcctaacatgtcaataggagttttcttctctttctcttttctttttgacaaattgtgtccaagcaaattagtttgcttgcatgaagcgtcatctgtgtttgcaagctggaacagttttgctggttaagcagtctagagatgataaaattttttgtccgagtatgactttggtggtgaatttaaaagaatcacggccgctgctggaagctcagaggagaggtccattttaaagggcgtctgctgcactcagcccaaagcgttacggggattgtttgaattgacaaaatgaaaatatgtattatattttctctttttaaaatccatttacagtttatttgtctgatatggaggagcagaggtataaattacagagaaattgtcatcatatcctctggatgataagtagggccagggcttctgtttatttcggtggttggttacccactcaggacagtaaaatcacaaagttttagctaaggaaggagaaatcccttctgcctgtataataaatgttgttttgacccaactacactgtttcttgtgataaaaatatgtcacttaaggtttcctgcatctgccatttgtgaacgtacagttgagcgacattagttggtgccatctgtgagtgcacagtgcagcaactttagggggttcacaatgttccgcagccatcaccgccgcccagcactggcatgtttcacagtgttccgcagccatcaccgccacccagcaccggcatgtttcacagtgttccgcagccaccaccgccgcccagcaccggcatgtttcacagtgttccgcagccaccaccgccacccagcaccggaatgtttcacagtgttccgcagccatcaccaccacccagcactggaatgtttctgtgttttgattcttttttttttttttttgagacttaatctcgctctgtcacctaggctggagtacagtggtgcgatctcggctcactgcaacctccatctcccaggttcaagtgattctcgcgcctcagccccccaagtagctgggattacaggtgcacgccaccacgcccagctaatttttgtatttttagtagagatggggtttcaccgtgttgccaggatggtctcgatctcctgacctcaggtgatccaccttccttagtctcccaaagtcctgggattacaggcgtgagccaccgtgcctggcttcatctccagaacttttctgtcttgcagaactgaaacccgtacccattaaacactaactccccatttctgccagcccatcccctggcacccaccctactcctttccgtcttgatgctaacacaccttgtgtgggttcctccaagtcaagagaaggagtgtccaaagacccctgagaccagaaccctctgccaacgttggtagtgctgtttcggcctggagggcaggtgggcctctgggcacttcttcgtcaggacatggagccatttcgggtagggccctgggtctaccctgtcccagccccgttccctatcagaaacccgaggcccagaggtgcagggcagctgcagcaccagggtggacagatgttgatgatcagtgggaaggaattcaaagaaatagaacattctacacaaatgtggggaggtatctttagtaaaaacaggacccaagtacatgcaaagtgcactgtgagggagagagatgctctgaagaaaggcactgtttttacattaatgagcatttaaatgatgctgggttaaccatttggctttttgtaccttgtcaccatctcctttatggtgtgattggactttcgagagaaggtggaggaaggttaatagataggtaggagagttgcaggcaggaaagacagaaggccccggggatgataggtggggcagagggagggatggagaggtgacttcaggaagagcatcagctgccgcaggccagggcaccctcaggaagcaggccccccatgcttgcagctgcccccgggagccctcatccccagtctgacaactcgaggtagatctgggttgctctttattttttgatgatttttgcatagtttcaaggatcagtgtcttctacactgatattctatctctgtaagtttctccgaggtattttcacctgtactgacattgtagtctttccttactctcttatttatttatttaccagaccccaccactgggtgcagtgatcaaaaccaaaatatcaaaccagcaccagaaactcttcagcagaccggtggaacatgccttagagaaagccagaggggtcaggcatagcctcctgtgcctggcctgcgctcgcctgggaagggcacccctcgctgtccaagagtgaccccaggccacagaaaccacgctgagtaccaaaggcgagtccccagggtgtgggcaggctccttgctggcatgttcagcccaggcttgccggaagtggggctcaggctctgtctgtgggataatgatcagaagcttggcagtcatgggaccaggataagaagaaccaaaggacagctctcctctcatggttatgggccaaaaaataggtgattgttttaactgtggaaactgacccactaagggggacctgctgagaggaaggccagtggggccgcagacaggaggggaggccacagccgcccacccgctcatggccgagcgccccgtttcctgaacatgtgggaggggcaggctccccacatgggaaccactgggccgtgactgtggcgctccagctgctggcagtgcacacccggtggggccctctgtggcttgagctgcgtcaccatgacgctgcatgcccaggtggtcatccaggaggatgactctgtgcagacctgtgtgcccccgggcctgggcctcctgcaccccagaggtcagtgacagtggaaattgccacagacgtgggtttgtggccttcaaagccttcaatgtcacagaattctgagtctttagctaaattaagtacatgttcacgtgagtgtgtgatttctccatgaggactgagcctcatagtttgtccctgtaccggtgtcagttcatcgctttggtcttggtggagaattctgcatcgcaggcacatcgtctggttagcgggagacatgtttggccagcggtgaaagactgccttgcccgagttcctgagacttcggggctactgatggcagggagaggctggccgagggcagggccacgcggtccccttctgctgatgtccgtgaggactgggcacagctgccagagtcaagggcacggaagtgcaagcagtccgtccttttctgaagcctgctctttttgtttttccccacgtgtgtcaccttttaacgtttttttcctggctttttcattaatgtatgtaaaaatattaaaagcccttgtatattacatgaaaaactatgtcagctgccttgcttttttctatttattaaaacttttcaagcagtaaaaacattttacttgttaatgagggaaagtgggaaaattaatgacatagagcttggatccaccacgatgtctcctcttaaccatgcgcagccagcttcccaccgcatggagtttaatttctgcgatagggttcagtaagcaaatgcaaatagatttaatgatttgcatcagtagatcatttctcagtttaatatcctctgatattttgggtcaaggactctttctttgggagactagtataatttctagaggtagaattattaatattagtgatattacattatgttgaagtgaagtgagatagatgtatcattttcacaaagtcagatttctgcgtgacttttattcattgtggtgcaaaggaaaccctggctgctgaagtagacttaggagcaggcagaattcctggacgcaggtgccttggagtgaggtgaccctctctggcccccagcaccttgcgagcagtggtttttgcatctgttcaccagcgcatgtgaacctgtgggcccgggggacacgtggtccatttttgttgagtacgttcaacaaaggaatgaattaaaatgagaactcttttcagcaaacgctgatggagctttctgtgtctcgtgtgtggcaccatgctgacggaatgacgagaaaccacaacctggcctcaaggagctttgtctactgcgggagacagagatggtggcagatcagtcctggaggcacaaggagagagtggtagaaatacacaaaaggcattgaagaccagtggagcatcagggtcactttcacagggaggaggccaggggtcttgttgcctgcctgccccaaacgtggcctccattccttctttctgtctcccgctggaaaggctgagtgcaggtgccagctctctctgcctcactgagcgggtatgtgtgagaagcgtaggcctactggcaggctcctggggaagacgtttctcccctgatacaaagagcagcatgaggaagactctcccggctccccagtctgcggacacagttgtgtgaatgtgattgcaggagggagctgggcagctgttatgtgaccatgagggcgtgggactggggctgaaaggtggcgtgctgccaatgagaaagatggggagagctgggcacctgctggccctgtggccggccaggccgcctctgaacacctattctgtgacctgatgtgcatcctcatcacacactgcagccgtgagcagcacgcaggtgatgacgggtcatacgccatctggggacttgatgctccttttagcaaatacagaaagtacaaaggaaataagaatcagttccattaatcagtgatagtcttttggtgtaattccttctagctttttttttgttttcatcgacatatttaaaatcagttttgaattctacttaattttatatcttaagcatttttcttgttctgacatctttttaagcatgatttttcaaggtctgtgcttggttctttgttaaggcctgttgcgtggttgtacgtggtggtattttaactgtctatgtcctggtgaacctctatgtttttgtttctgtttactgggctgcagtaaacagtctcgatgaacactatgtagccctgggtgagtgcttcctgagcaagcttgctttttggcctttctccctgtagcttttttgtctgtaacacccctttctgtattgcaggttggcttctgaaatcaaatgtgaccctaagtgactcctcactgtttttaagataagaaagcattagctctgtgttttcctagcccctccgttcttgtacttagacccttcactctgaacagcaggtatgccagcctgtacttcctggcattattacccagtggcccatagctcagaagtgacattgtgtggtgtgaacgctgtctccggagcgagattcctaactcctctactttacagctataaagtggacaaatcacttcactccatgcctcagtttccccaggtatcacacatggggactataatagcatctaaccacatagattgttggacaattaaatgagctgaccagcaggaaactcttagaacaacgccaccccatagtaagcactcaataaatggcaactgctgccgttgatgaggatgacgatggtgctatttctaccacttcctaaggtcgcccctgcgtgctcagcagccacctccaccctgccctacccgctgcccacatatttcataggcctccttagatgtccctgtctttgagccgggagccctcgcactcccaggcttgcttcagatcccttgcctgagcctgtccagcactttgagcccgctctgcccgagcgctgttctccttccgtgccgtgctgtctgctgtgagtcctggagaacagggaccatgtctatcttgctggccttagtacccctcacagggcctagcccagggggcactcaagaaattgtaaagatccataggccgggcgtggtggctcacacctgtaatcccagcactttgggaggccaaggcaagagactcacttgaggccaggagtttgagaacagcctgggcaacatagattctgtctctacaaaaaaacttaaaaaaaaaaaattatccaggcctggtggaaggcgtctgcagtgtcagctactcaggaggctgaggcgggaggaccgcttgagcccaggagttcagagctgcagtgagctgtgattatgccactgcactgcagcctgggcaacagagtgagaccctgtctctaaaaaaaaaataaaataaaaaataaagatcctgtaagtgaagggttagaagagtggaatatatgtgctcttaacaaagaatggtgtgattatagagatgggaggtgaaaagtagcacgaattccaagttttattttcggcaactccgtcagagtcctgaatgttctttacccagtttctcactcccactgggactctctagggccagcgggaaccctgcaggcattcggagaactgagcgctggctggacctcctcaaaacggggcaccctccagggagctgtcgaggggctcttctgcctcttcagaaaccatcatcagctgtgaaatgtgggcttccaagtggttttgtgtctcctcagtttacagagtccatgtttttggtgactcttgccttggaccctgatggcgctggggggtttcatcgccatttaaccctccgcgtctcacagagaccaagcagtgctttcgggatcgctctgttggtctctgtgtagcacgtggcccccaaaatttaggtgttgaagtcctcatcctcagaacctctggatgtgacagtatttttgagatagggtctcttagaaaggtgattagggtaactcagggtcattagaggagcccctcacccagtgtgaccggtgtccccatgagatggaggttgtggcacagacacacggagggatggccacgtgaggaccctgggagaaggctgccttctgcaagccaaggagagagcgccttggagaaaaccagctgtgcctacaccttgggttcagacttgcagcacccaggctgcagggcttcgtcagggcagccctggcggaagaacgcagcctcgtcggtgggtttggtgatgctgtgcagttcagctttaccgtcttgctgcagcgggaacgtcctgctgtagaagaggcgccgccatcccagacagtgttcataaacaccgacggcaaagtcaggacgggcaggagcgttctaggcaaatgatgaaaatggtattttacacatatttgaaaagaaaggtttgagaaggcatccattattaaaaccaaattcaacagagaatttaaaaactggctgtggtgagcaatgttagtcccaaatcactttttcacaacttgtttctgttctgtcgtagggctagtgagaccagctttcccttgagttctggggcgggacgtggaatgtttgtgaggctacccttcattgaaggggggcccgtgatgttgagtgttcaccgtctttcagaacgtttgtgcggtggcgtgtcccttctgtaaattgctgtgacctgggctgcatgctccacagtcagactcgcttcgccctcttactggtcttcattaattcgtggtccctggagtggagcgggaaatacagatatccacctcctctcattatccaaatacaataacaaattacgaagcatcttatcctaccaaccattatcctatcagaaagcatgtgctaatttcgaggaagcaagaggaactatgtcagatgtgccatgagatgtaaaatgtactcgccctgtatcttggtcttctcctagcagtatcttgtctgacaatctccttgtttaacttcttgggctttttctttgacatcttcccacctttccctaagggtttaactgtcttagatctccttgtctgcttctgcccgagactctgggtccctgtcaactcgggtagaattttattggtatttttaggctctttaacatactttaatcattgtgttgctgcatatatttcttctaagatagaagtaaattgtaattgtcctcagataataacctaggaccttaaaatacacacaaatgtacacactaatgaattttgtaaatattacataactcggtaattattgtttcaaattagataatgcagaaatctctggatttttatgtcggtgtttataaagcattttaatgataattggggaagttggttgtgggtttttagctagaacaggaacccattataatttttcccaattataataatgggacataagcctctgtaacctgaaattttcctctatgacatgttttcagaagtagaattattagatttgatgagtgtggatgcctaggtttgtagtcaactttttgaactgagctaatcaatgcatatttgggaagagcatataatccaaaatattgggtctacaaatgtaagattgcctttggtgatgagttggtgtcatctgtcttctgtaggaaatgaagggcctcttgcagtgtgctgtgcctcattttaaacctttaactggcaagtggtcctgatcttccctctggacagctgcgggaagaggtttcccggtttaccttggcccccgtaacaccacatcatcccacgtgtgcgtgaagagcccgcacaggccccctgtgcgcccggggtcaggtgtggatggggtcggggtatttccagtacttgcgcttcggagtctttttaaaattgagagctcatctattgttgataaatggccaaatataaatgtataacaccttgattaataggctgctatgaaattgaaggtggtcttttctaggaaatcctcattgaaatactgcccattttgaataagtctaatagtacgatgaaccacacccttagtggaaacgttataggatgcaaataggaagatttgtgggtgtttttccttcatgaatttgttgttatctttgcagaagtgaagaatatcaatattttatggcctttctttgggattcgtgtttattaccagtgatgcagagcgtggccctggtcctcagcgcctctgcctttgtggtggcgggggccagtttgcctggtggggaggtgtgtgtgttttcaccaagttagcaaatttcctgttttctcttttaaaatggaaggctagcttcctctcccattggctttttctggagattggaaatggtattacagtctttgttgtgttattgtggaaatctccggcgtctctcctgatgttgccgccctgcacggccgttggagagtacttgcaggcagccccgctccacaccacttttatcatcttcattttcattcttttgtgaaaatgtagttgctttggagcctttcgaaaagtgtgtcagatcatttttgccatttctctttttccttttactttctgttattttccatttcgatctcagatacccttcttaggaagctgcatccccgacgccgggctggtctgttctgctctgggggcggcgtgtgctctcatttcactcccataatcagctttggcatatgggattcagagacgcagtgcttggtcttctgagatgttttgtgcagcagctaggtgatgtcccagttctcctggaatatttgcatcgaccaggatgctgtttctgcgtcggaacgtggtgtctttgtttacccttaggcattatcttgcttgtttacctaaatctttaactctccttaggtgagtgacttcactgatactaagagtgattaaaataatgtgatgtatggagtcaacttaggcaatacatttacctgtacaccacacgtccaatatttattcagaatgatttttttcaaatatttaataagaatgaataattgaatgtactatagccttcttactttgccctgcgatcccataagacctttaaagctaaaactagtttgggcccttgaggggtttatagaaattaggtatgtctgagtatggaaatggctggcatggtgaaagaattgagtccttaagtaatttgctattcccagtgataattagaagaaacccctgttctagctccattttcccattttttttaatgttttaggggagatttctttaggtattagcggctgatcttttttttcttaccatgtactcccgctgtaaggtgagtggttttggcatattgtgttgccttgatgggttattaaatcgtcacttggaaggatgaatgtgggttatagagtatgttgtgccatatatcatcttagtcatcaggaatgtttcagaaaactgaataagagtaaagttttttaaatttatgattgaaattagcaattttattaggtccttttaaaaaaacctacaaacttttaaagtttttctcaaaatatacatctttgttctcagaagaggtctgcagactgccctaatttgtcttttgaaaggacacagaattttagcagaatacttatgctgcagaaatggacaaatgcaggtgctgttccttggatggtcagcatggaaggttgacgtgctccaagatttactgtgcgtcaccttagccatcagtcccatcgtattcatttaactccactaataagaaacggagcaaaagtggaattatgagttcagtagtattctatgaaaggtcagttgttaaaaaggcagagtctgacattctgtgaaaaaggtgccttcattaatcattctgatgggagagcacggggcgttcttgaccaataccagtgaaccttgcaatgcaaagtttcagggtctgatgtgtaagttcttatataaaaacgaggatcgtttgaatatatgttgagatcattcaaggaattgctttacctttgctgtttaaaagtgtgtatatgatatagaacacgttattaaatgtgcattactgttttgaaaaaggaaaaacacctgttaattttatagataaattatggaaatctgtggtagacacagctccaggcagtaatgcatttccaagcgaatgaatggacatttcctatatggatcatctacagatattggtaaggtttctttaagtctcttttgtactctgcattcgtggctaaacctatgcactttgaccctgttctgcaaaacaaaccatggcctactttcagactctccttcgttcttttgctgttggttacggtggcagagtgcctactgtgtacacagaatctagacatttcacattgaattatctgagtatttatgtgccctgacaattcagcgttaaagttcaatacaaatatataaattattaagcagttaaccagtgacacattcatcagctgaacgtcttttattgtggcctgtagacagattattttcattcagccattaaagcacaatattgtcgggtgaaattctgtttctggattttctttgtctctgttgctgctatggaatttcattgaaagcatcgaaatatgagactaacacagaatactgagtgtttcttttcagaaacgggaactttcagacattttctctccagctgaattcagtaaagagcagtgtgtgtgtgtgtgtgtgtgtgtgtgtgtgtgtgtgtgtgtgttcctttcccagccagcagtgttatatctgaagggaagggtggggatgagctgtggtgccgcccttcacgccattgagacgggctgggaaggtgccctttcaccctctacctgcagttggtgcctagtgattttaaagattcaggaatgtctttcaccgtgattctcactattaaccaatctcacgtatctaactttccttactatattattagttactactttctatacaagagagaggtggagcctgcctgtgtcacgatggggaaggcccttgggattcgctctgtgggtgcgggcagcgacaggggtgggtcagggtgcaggcggtgagacggcgagcgaggaggtcgggaaggagcctccacaccccagcagggcccattccacacgagaccccagacgaggggagcagaagctgctggtgcctctctgttctttgccggatgctaccgttgtctgtggccacacttgcttcttcaggtgtggaaatagaagctcagagaagttaaacaatgcgccaaatgttacaccttcccattctaacgattttgtcaatttcggtgtcaaggtgatatcttgtctgatggtggaggtcatagttgtctgtgaggacatggtatccaccctcaagcatgtaattatgcatggagagggctcagttcagttttaccgagacacagtttattggagtctacaaatagcataaactgctatgtctgcagtgttaccattctctttccttattgtcataatttttgtttaatggctgtttgtgctacattgaccaggtccatgggttgcttaacataaatgattacatttgcttatgattaaaaacttcctccattagaagcactgcacccaggacttgtaaatgatttgttgttaaagttttctacttcattagccacgtcgttgactccagagtcattgtctaagagttaggaacacttgtaatgagctgtataatatggaccctcgaacgaaatttaaaaagagaccaagccttctaggaacagcttagcatgcagataaaaggctaggaaaatgtgtgaacagcgccaggctgtaggctgaggcacgttccattctgactcagaatggcatgggtgaataaagtcttttatgatggagcaagacttgttgtaaaaaattatataccattcatgaccaaaatccttcaaaacactccgtcaccattcccttctgaaccctatagcttaagttctaagcatcttgtgagtctcttgatagagcgttgaaaactccatgcaatggtctttgggacgccattcgaacctggcctgccccttgctggcaccttgttcgtctttggctccatccggggatttgattgtcagtgacccacctgattacagtgggctgccatggccctggcctcgtggtacaaaaacatggacgattttgtgatttattatcggaggacagctagcaaagagaacttcctggaataactgcattaaatgtgatgggcatttttgtgacagatgtaaaattcttaatcttgaaagcagttgcatgtgtcaggcagactgggtgttaattttctgacagcagtaggaggagctttttttccccattacagatggaattaggtctactttgtacacagtactttgtgacagtgactctggccaggggaggggatatgctggttctggagtctgagaagatggggctgagccagctgtgactcggccacacgtggctgtgggacttcgcactgactacgcagcctctgccaggtttctttgtaaaagtgaagttaacaccgatctcacaatatctggggaggaataaataggaacacacatgctgagttaaagtcctcagttatttcgtcttcagcgacagatgatccccgacttaccgtggttcagcgtttgagttttcgagctttatgatggtgcagaagcagcctacgtgcagtagaaactgtaccacaagtgcccgtgccaccattctgcgtctcagtacagtattgaataaaggacatgacacagtcaccactttattataaaataggctcgtgttcactgatgctgcccaactgtagctaattcaagtgttgtgagcacgtttaaggcaggctgggtggaaccatggcgtttggtgtattgaatgtgttttcagggtcgatgtttttaactttcactgaatgtatcaggatgtagccccatcataagtcgaggcacatctctgtttgagtgcctgttacgtgctggccatggtcccaggcctgcgggatgcagaggcgaggacagtgtttgagtttctagcgtgctcactgtgtgtgggtaggatgaccctgccggtctgtgccctggcttagtgaactagatctcgttggtgtcctgaggccgagtcttctgtggtttctctggagagtgtggctctccctggtcagtattgtgacctcagttaccactttctgtcccctacattcatatactcccattcatgtatttaacaattctttactgctgtaagataaatggttttcaattatgagttttgtcatgaaaatttaattttttaaaaaaaatcaaaagacctggatgtggtgtgagcatgcggagctcccctttctgcccaggcctttaccttcctgctaggaggcaaggtcagcccagggacagtgctgggagagagcggagttccgtcgttcatgggttgctaatttttggagtactgcaatacaattaaatatacttaaccttaaaattacccagaatgtgattgaatctgtgattcacaggccccttctggttctcccgtgcctcggtgtgatcattaggaggatggatcaacctggtgctatcgggaacgcactgcgttaatggcctcagtgcccagcaatggagaactttccactgagtatccgcatgcagcgtgcccggcggaaggtgaaagcttcaccctttgtctcccttgccatcctttggccttgtgtgtttggaagtagccagaggtggtggaacagtggtgggctggtttgggtcttgttggcagtgccaaagggacaaaggctggatgtgggcacgacctcagcctcgtgatgggcaagacaggtgggggtgactttctgttctgaaaatgacctcctccccttcttcctcccctcaagcttcctacctttcctccccctccccctcccttcttcttccactcccccacttcttcctcctctccccctccttcccccttccccctcctcttcccccttccccctcctcttccccttcctcctcctcttccccctctccttcctccccctccttcctccccctctccttcctcccccctctttcctccccctctttcctcttctccccttcctcctcctcctcttccttcctctcccctccccctcctcctccttctcttcctcctctaccccttgctccttctcttccccttcttcttcctctctctccccttcctgtctttccccttcctcctcccttcctcctcccctcctcctccccttcttcctccacttcctcattttcctcctccacttcctcatcttcctcttcttcctcctcattattttcctcctcctccccctcattttcctcctcctccccctcctcctcctcccctgcttcccctcctctgcttcctcaccctcctctccttcctccccctcctctccttcctcctcctcctctccttcctcctcttcctcctcctcctgcccttcttttcctctgtcttcctgttttcttccctttcccctgctgtattccttcctcacacgcccccctcagcctcttttctggggactggctcttctaggaggcctgcctcaaggccctcaggccagttcccggggcagccactgagcagaaccgcccctcccagcgcccacctatggccactgccctcagggtcccttcctccagcatggtgctggcggatggcgccataaacaggctgtcactcatctgcaggctgccttgtctttcccccagcagattaaagccttcatgaaaaaagatggagggcgcttgactttgcgacacgcacattctgccgtcttgggaagggggaaagaggggcatctagctgggcgctgcgtgtagcctgcccggcggggccggggtgtggcaggaccgaagcctgctcctcgtgtggggcccggcgcgaaaacagcttgtgcagccgctgagtgactgaggaccgtgtcccagtgtagtgtcatttcctcgtacatgtggagtttaaagaattataggtaccttgagctactggcaggtaaaagacagtaaaaaaaaaaaaaatagtgaaagacacagtctaccctctgaactgatctacaaggctatgaaagcatcactttgaataatatgcagtagatatgttagaaaaatgtaatattggtgtgtggacccctcagcctctttgacgagtgttgtaatatatcttgttgaatgatgaatatgctaccgtatgtttcaactattcctttcttgtggctgaaagaaaaatatattgaaaatgaatgtaaaatattgacatttagtagttgttatgctccactgtaatttcttgttgctttggatgtggtagacacctcactaattacacggtgtgtacatgcgcacctgtaacaggagccgcgtgaaagtctgattggaactctgacttgatcagcccatgttcttctgccatagccacaggagcatctgaacgtggtgatggaagaagaccctggcgccccgtctccccgtggattagcggccctactgtgagatcctggtgatcttgatgatcgagggttatttgaagcagttcattttgtgctgcagttcattgaaatgccaccacccagaagacccctgagtttccagaggtcctggtgctttttttgctggggcttggaccggagcgtctttagagtgaccactgccagggaagacaccgtggtcggggcctgtgattcctgccggggccccaggcaggctggagccacaggtctgagttctgtccagttcaggttcgtaggccactcttgcagctctgttccttcttcagctcctctggtcattcacacgtggcctggccacttgcctattgtaccagctctccagggctggggacttgctagagcagggttcccagtgcccccaggctctactttgctctgcctggtctcagggtgtaggggatggagagctggacttccagcctgcttcttggctgtctaggtgccaggggctcgggacacagagctcctggaggccgagcacaagccttgggcagaggtgaggcagagctctgactgtttcattcgactacgttgccaaggagatgctcgctcggagtggttgctctggctctgggattccaaaccaagctgccttctctgatgtggccttagtgctctgggcggatgtaccttggctctgcctggaccctctctctcttccaggcctctgtcccaccaggatgatgcctatccagagctcattgtcctctcccacttcctccccgagcttcccattccgtgtctctctggagggcccatcatcatcctggtggaggtgttgcactgaggaccacagcagccctcgcattcctacacatacccctttgcccgtgggatttttgctgtttctcttctcccactgttggtcgttggctggatctcgttgaaggcctgcggagattcaggtgccatagggagggtctgggacttttctctcggaggccccatgaagttggtattcctcagctctgccccagggtccctctgattccacggaggagctgcggaaagtccacatttttgaagagctgcaggctggggagcccccgtggcgaacagaggctctaagagaggggtctttgttttggggcagtgagactgagtggccagtgagcaatccgtcatcaatggagatcaatacccaggaggtgccatctctcttggcgggtgacacgtaactgttacaaatgggtgcctgtccctgtcacgtcaccggagtgtgcgtcttgatgccctggctccctgaggcagctcgtgttttcgagtgtttccattttagagacccggaaaagggatccttagagctgctttgttttcctttttcaccagaaacaaatgcctttgtgcttctcccgcctgcggactcccactgcgttcagcccgtgcgggtggtcatcggccagacccatccagcctgtggcccgtcccctccacctctcacagccacctaggaaagtagttctcagctctaaggggcattgtctgttccaagaagaatgactgctccctgccacctcccacccccatcccatgtccccatcatagacccagcaggacagacccccccagagagccagtggccttcttgcccataactcgttggtgctggagagctgtgggtagcgtagcaagtgccactgagcatcctggaaaccctgggaggggtcccggcgagaaagagccatcaccctaagaagattcaggaatgggatgatcatggggttcagggtgccccaacagtaggttgaaaatcctgtccctggccaggaggcagggaagtagcaaccttattcaaggggaaaaaaaacctcctggagtctagatacagtatcttagtagtaataaaagcacgggtacagatttactggtgtcggagttttaactgtaatactgtggaatggtaggttattttgtgttcaagagctacatttatcacaaaaatgatgatatacaaatcacttccatatcacaaaatgttcttggtcaaaattggcttgaggcaagtgatatcttcgagtaaacagtatatgaagaccatatcttaaaatgatagatcacctaattttgttctgacagaggtttttgccgcaacaaacatctgtcattgaaataccaattcagagatatggaagccaaattgtagaggttttcctggatttgtcactcctaacttaagaatgctactgttcccatcgtagcttttataagatattaggcagtgttgcactttaagagacattaaaacaaaataaacaattcagagaaatacgctttaaatgcaaaccaaccattaaaaagtatagaagtcaggaatgggccgagacagcctggctgtttttatgtgcagacatcacattaagctcgctttacttggagattttgaactgtagaggcctccaggcctcctgccttcacttgaggtttttggtgctttttaaaggactgtgataatgatgttattcccaagatgtgaaggaccattctggtgctgtcctgacaggggagcaggtttacagctcaggacactggggtgccacggggacctgggggtctccttgtgcctgggattcctcctcgtcaggagccctcactcaggaagccctgcacgggggcaaatgtcctgggattggagaggcaagcgtgaatcagacatttccaaagacgacaccgaagaacttctgctgtattccaagttaaaaactaattgatcttggtccaaactatcataggatagttaaaaaaaacacacaatagaatttctgaggtgcttgggagacattttagaaatatgtcattggtgaccactttttataggctgaattaagaggaaaaaaaggtaaaatatcttttaaagtctccagtttctgagacccctctggagatgatttcattgagttcctccctctgacagctcctatggacctggagggctctggtttctggagtagcatgggagctggccctggtcctggctctcctgcccacctctgcccccttttccctgccccctcctgactgcagccaccagtgcccgccatttcttcctgcgctgcaacagctctggccagtcctctccttattctgtaggttgaagtacattcctggaatccaggttttcaaagcattctatgcagtttcttgcatgaaatacaggagcagcctttcctgggctgcctcacacattgggcttctgtattcctttatgacagtgtgaggcaggcctggctaatgtcttccagcccattcatctccccacagggtatgagatgatgggctttagcgtcagacagctgggcccacactccggctcggccacttacgggctctggcaggttacctcagctgttgaactcgtgagctgtgacttcctcctctgctaatgcggcactctcatgcctgcctcgcaggttcagatgtgacgatagacataaaacacctggcccggctccggcgcacagatgctgaagtcagttttctgaggtcgtggtgggggcgggggtgagggtggcaatggaaatagtgacaacagtagttggcgttgtcatcctgtttacggctagcctgcgagtggctcaggcgaatccagcacagccttgtcctcgggttagctgccctctcagagcttcacatcataactagttcatttatcatccacgctagagactggtcttccagaggatattcctacctcagagccccttcctcccgacgtgctgggacggcccctgctgttgcctggctttgcctggtattacaagggacctcaacctcctgtgctcttacccgggcctgacttgggtgatgcccagaatcccagtcatgaggggaccatgactgtgggccagttgctgacaaccttggtgggttgtagactcatgaaagaaacactcctttgcctcctgaccttgtgcatcagggaggatgcaggaggaacggaagattgagcccggggagtgctgtctcggcagtgccacttcagacaagtgagtgtccctttgtgggacgtgttctcaacaggcacaggtgaccttataggtattgggatgatgggggtgtgcctgcaggttgtgaattactttttgccttcagagccaccaacacattcacacaaacatttgttttccttttgattttatcaggagaattttgtttctttgcccgcctgaacattgcttgccctccataattgagtgtagactaactctgcagcctaagccaaagtacatcttttgtctgtgcgaagagaaagttccatttccctttaccaagttatctccatggcccttggccacagcaccctccgcagaccctcacgtgcatggccgcagcagactgcccacacatttgcacactgacattggtcttattctcatcaactaataattaaaccagaatccaagtaagtgcaagaatcaaaggctttgagtaggaacaaaaggctatgttactttgtatccttaactaagaattttgttgttcaagaaatcctgggcttttgttggtgtagctctgcaagtcagcagcacccgggttccacccggtgcttacaggtcacgagtccagtgacgctgattgaggtgtgtcaccaaatatgctgcagatccggggccagcccacctgggcctccggccacggtctgtgcccacgtgtcacgaggcacatcccgggtcatccggagagggacctacaaagtctattttcaaaccaagttattttgtgaaatattgtagtgaacttatcaaaactggtgaagttgatgaagtgaaatgaaaatactgccatgaaaattattttagtgcaacataatgagttctgtttttcatatctggcagatattacctactaaatctaatctgcaatgctgagaattatgccattttttatgatttgtttaattttgactgaaaaaaattgactattcatcgattcttgacctgcgagtattgagggaaaaatttagttaataagaattttcatgaggtgtaaatttaaatgtatgaggattctgcctatcctttaatactatagacattaatttaaaaattctataagggcctgagggcctggggtgtctgaagaacagaacatggaggcagttatggttgttaactggtagacaaggtctgtcaagataatataggaatattttggtgttttccctatatccttggttatatgtggctgagcataattagaagttaaatttgttttagataatctcttcggctgtgaaatggcatcaatacacttaagagtaacaagtcgaatagaaatcagggcctgttgttagtgtatgagcacacaccacacaaagtttcttcttggttccctatttccgcagttcaaagggggttttaaagaagtcataaaaaatgaaggatcctaatattgcagttggagactgagagtgaatgacatattctttacacacctcaactgtcaacatttctaatcaaatcacccagccttcttacttcttaaatgatacaggcgatatttcctgtaataaacacccctaagtctaatgagaggccctaaggcaacttgaaatatatgaattcattataattgaacaacataatctgcagggcaaagatgcctgctacccagctctgaacttcacagagcttgggtgttttatgaaaaatgttatacgttttgtttacaacgtatggctgctgtttgaagtattgtatgttcctgtagtacataagacggggccgcataatggaggaaaaatcaaggaggcaatctttcattttgttctggtatgaaaaattcaaaagactgaaaactcacccagagaaattttgcaagcatattattttccaatgtttcgatcaatttgtctgtcaaccatgctgagaggtggaaggggccagcaaaagcaatttagcttgtgaggtccaaaatagaaatgttttagggaaccttgtcacatgttatttctttatattagaaccgccgtgtgttttatttgctggtcataatatgaagagaaattgatatcaatcatctaagtaagctatgaatatctgatataaatatgacttttatatgcatgcatcagaatacaatataaattaacctcttcatgcatgcaagaatcgttagtgcgacagcgggctccctgttttggatttttccatttgacaattcacggtgcattttaattgattgtacccaagtgacactccgtggaagcatcttgcatgtgaacgtaactgaccctgccagggctttaattaagctataatcttcctttagtcagtgcatctgggattgataaacatatgtaaaccatgctgaccatctaagtgttgctttaaagaaaaaaatggtgcagatatgggagttttaaataaacggctttgatgttacctccagttgaatttttagttgggatttgttaagatcaagttatcttaggagtagttaattctaaggtgaatatacaatcttggtgaaacttgtcctggaaaacctgtaattctgtgattagtctgtgtgtaccccaacactttttcttcaaatcttagattaacactgaatacattaaggttatttttcaaacaggttatagttcagagaaattaatttaaatcagttggcttacagaagacccagtttagttttaatttgccttaacagccagggtcttcctgctctacttacttagacgtcctcagagtgtcttctgagtagttggctaccatttgcatggcatgattccgctctcggagcttgatatctttccagattttcagaatttagaattaagtgtggaagtcaagcatactgaaagttttttatactatggatgctgataaatagaaataaactatgacaaattaattcagaaatctttccactcagtgtagatattaagttgtggtcatacggaagaagtcttgaaacacgatttacagtaaattatgataatttgggatagagactgtgccattaagagttgttaaacagcatgattcagacagctctgttttttccagtgactgcctattcctttattgtatatgtgtacccaagtgatgctctcacatttatcttaagtccctattattaatatacatttaaagtctcccgaggttttgtttggtttgctttggtccttttttggagtgatttgaagcaaagttaattgtggaacctatttatagacatctttctatacttgcacaagtctgtgtataatcaattctgagaagtagaatttaaaatttagtgctttgaaaattgtcctcattttaattttttggattttaattaggtaaggttgaacatttttccttattttcattgattgtttggggttccttggtaaaatgcttgcttttgtttcctgttgggttattttgtctttttcttattgatatgtgagaactttttgcatattaaagaaagaccatcatttctattttgattttgcccagggaatttttttcagaataagaaattcaactagatttttaaaaaacttttaattgggcaataatttcagatttacagaaaagtcacaaagattgtacagatccttcacccaggatctcccaatgttaacagcttacataaccatagtacatggtttgtcaaaactaggagattaacattggtccattgtggtcagatttttaagtcccttcctatggcttctaaatttatgaggtgcttacacaaaggcctttttaaccttaagattttttttttgttttgcttttgttaatcatatatgtttatttccttctactttttaaatgttgtttttcatattttcatctctatttatttatttgaaatgtgttttaatttaaagagtcttggttggaacctatctttattttcatctaaatgctaactaaccaactttttcagtatcttttgaattactcgactttgtgtttacacacattttacaaggacaacaaaaaagtgcctgctgattgactttgtagtcaatcataacccttgaccatattttttttggtggtacttcatatatgaaagagtataaaatctaggttatttaatgttgttataaaattattctaagatcaccgaatggagaatacttagattctaaataagtgactttgtgagaattgaatttttatatcattaaccaattctaagacattttaaagaaggcagaatgatctaacccaatacttcatatacttagttttactgtggaatcccaagggcaacatgtcccccgacccaacgacaaaataacatatattcctattaagtttagggattgatggagcttgtaattgttaatttgtcacagatgatactgttatttatgcgcagttactgtctccctttggagagtttcatgtgctaaattttcagcaaatagtttgagcctcacctacagcttcttgaccttttggggaaaaaactatcactttaaaagaccttttacgagtgagcaaatatatgcttttctgttttcacagtaactttcagagaaacccactggtctcagcatggcctatgccttggcagccctttccacccgtagcaggttgttctttacctttcgtttttaaggtggcttccagttcataccaagctcacatactgtggcgaagagctttctgagaaacttcataagattttgctaagatattaatgaataatttagtatattgttgcatatatgactgagtatcacatttcagtaatgtttttactatctttaaatataggtacataaatcctagcttggggtaaaaggcattgacattttctcagtaatagttctttgtagacagacctgggttcaatattagctctgccacccctcgagctgtgtcaccagaagtaggttgtcctgtacgtctaacttcagtttgtctattaaaggggattgcaccactgacggcttgatcagggttaaatactccagcattccttggaaaacacttctgtgagcattgtcgcagacttgatgatgtagcaactattttccctaagtttcccactttagaaattattaaaaatattgctgccttcatagctttttcaaaggttttctcttatttctgtcagatctcttacatctaatattctcattcccagcagataattaatctattaagaggcaggctgtgggcccctctgataccagggaaagtgaaaggcaccagggcaggagttctgattctagcaactgcctggccgctgtgtgatctccacacagcatcaaaccttgcagagttctaacagaagtgaatagaagattagtctcccacacaacaataatgggagactttaacaccccaccgttaacattagacagatcaacaagacagaaagttaacaaggatacccaggaattgaactcagctctgcaccaagcggacctaatagacatctacagaactctccaccccaaatcaacagaatatacttttttttcagcaccacaccacacctattccaaaattgaccacatagttggaagtaaagcactcctcagcaaatgtaaaagaacagaaattgtaacaaactgtctctcagaccacagtgcaatcaaactagaactcaggattaagaatctcactcaaaaccgctcaactacatggaaactgaacaacctgctcctgaatgactactgggtacataacgaaatgaaggcagaaataaagatgttctttgaaaccaacgagaacaaagacacaacataccagaatctctgggacacattcaaagcagtgtgtagagggaaatttatagcactaaatgcccacaagagaaagcaggaaagatctaaaattgacaccctaacatcacaattaaaagaactagagaagcaagagcaaacacattcaaaagctagcagaaagcaagaaataactaagatcagagcagaactgaaggaaatagagacacaaaaaacccttcaaaaaatcaatgaatccaggagctgattttttgaaaagatcaacaaaattgatagactgctagcaagactaataaagaagaaaagagagaagaatcaaatagacgcaataaaaaatgacaaaggggatatcaccaccgatcccacagaaatacaaactaccatcagagaatactataaacacctctatgcaaataaactagaaaatctagaagaaatggataaattcctcgacacatacactctcccaagactaaaccaggaagaagttgaatctctgaatagaccaataataggctctgaaattgaggcaataattaatagcttaccaaccaaaaaaagtccaggaccatatggattcgcagccgaattctaccagaggtataaggaagagctggtaccattccttctgaaactattccaatcaatagacaaagagggaatcctccctaactcattttatgaggccagcatcatcctgataccaaagcctggtagagacacaaccaaaaaagagaattttagaccaatatccttgatgaacattgatgcaaaaatcctcaataaaatactggcaaaccaaatccagcagcacatcaaaaagcttatccaccatgatcaagtgggcttcatccctgggatgcaaggctggttcaatatacgcaaatcaataaatgtaatccagcatgtaaacagaaccaaagacaaaaaccacatgattatctcaatagatgcagaaaagacctttgacaaaattcaacaacccttcatgctaaaaactctcaataagttaggtattgatgggacgtatctcaaaataataagtgctatctatgacaaacccacagccaatatcatactgaatggacaaaaactggaagcattccctttgaaaactggcacaagacagggatgccctctttcaccactcctattcaacatagtgttggaagttctggccagggcaatcaggcaggagaagggaataaagggcattcatttaggaaaagaggaagtcaaattgtccctgtttgcagatgacgtgattgtatatctagaaaaccccatcgtctcatcccaaaatctccttaagctgataagcaacttcagcaaagtctcaggatacaaaatcaatgtgcaaaaatcacaagcattcttatacaccaataacaggcaaacaagagccaaatcatgagtgaactcccattcacagttgcttcaaagagaataaaatacctaggaatccaacttacaagggatgtgaaggacctcttcaaggagaactacaaaccactgctcaatgaaataaaagaggatacaaacaaatggaagaacattccatgctcatgggtaggaagaatcaatattgtgaaaatggccatactgcccaaggtaatttatagattcaatgccatccccatcaagctaccaatgactttcttcacagaattggaaaaagctactttaaagttcgtatggaaccaaaaaagagcccacattgccaagtcaatcctaagccaaaagaacaaagctggaggcatcacgctacctgacttcaaactatactacaaggctacagtaaccaaaacagcatggtactggtaccaaaacagagatatagaccaatggaacagaacagagccctcagaaataatgccacatatctacaactatctgatcattgataaacctgacaaaaagaagaaatggggaaaggattccttatttaataaatggtgctgggaaaactggctagccatatgtagaaagctgaaactggatcccttccttacaccttatacaaaaattaattcaagatggattaaagacttaaatgttagacctaaaaccataaaaagcctagaagaaaacctaggcaataccattcaggacataggcatgggcaaggacttcataaccaaaacaccaaaagcaatggcaacaaaagccaaaattgacaaatgggatctaattaaactaaagagcttctgcacagcaaaagaaaccaccatcagagtgaacaggcaacctacagaataggagaaaattttctcaacctactcctctggcaaagggctaatatccagaatctacaatgaattcaaagaaatttacaagaaaaaaacaaccccatcaaaaagtgggcaaaggatatgaacagacacttctcaaaagaagacatttatgcagccaaaaaacacatgaaaaaatgctcaccatcactggccatcagagaaatgcaactcaaaaccacaatgagatgccatctcacaccagttagaatggcaatcattaaaaagtcaggaaacaacaggtgctggagaggatgtggagaaataggaacactttaatactgttggtgggactgtaaagtagttcaaccattgtggaaatcagtgtggcaattcctcaaggatctagaactagaaataccatttgacccagccatcctattactgagtatatacccaaaggattataaatcatgctgctataaagatacatgtacacgtatgtttattgcagcactattcacaatagcaaaaactcggaaccaacccaaatgtccaacaatgatagactggattaagaaaatgtggcacatatacaccatggaatactatgcagccataaaaaatgatgagttcatgtcatttgtagggacatggatgaagctggaaaccatcattctcagcaaactattgcaaggacaaaaaaccaaacaccgcatgttctcactcataggtgggaattgaacaatgagaacacatggacacaggaaggggaacatcacacactggggactgttgtggggtgggaggagggggaggggtagcattaggagatatacctaatgctaaatgacaagttaatgggtgcagcacaccaacatggcacatgtatatgtatgtaagaaacctgcacgttgtgcacatgtaccctaaaacttaaagtataataataagaaagaaacaagatgagcttgtggactgtctttcacatcctgggaacttatagaaaggtagttaggattattaagcaactaaaacattttcctttatttttccttccttaccgctacctctcccaagttgtaataatttaatagttacaactattagtacaaatagttttaaaagtctctttgagttgccaccctggagtgtgtatctcctaatgggataatacttaaggcattttataaactttaaagtgccatggacatcagtcatttgtgcatttgtgagcactgcctcatttaagcctgccgtcgccttaatgtactgtgtacattagatacgacttcagttcccttatcccaggagggctgaaacttactgggatttctgttatattgacctaacagattaggatgattttaaaattttactcattttctatattgaattaaaacaagaaattagctgagcattttccaagatggaaggaaaaacggccattgttttgatttctagttatgtaacccattccaaaaattcaaacatgagattacacggagtgctgtattaaacagatgagtacctgctcactggcttcctttcacacagtcgcctggcactgcagccacacctgtgctcacctgtacctgcctacctgtggctgggccaggccccaggagtcccgtgggtcaggagcatggcatggagggtgggcagagctttctgctcatccccggatcatggcagcgtcagatggaactcggcctgccccgtttctgtgcagctgtcaggatgtatggggttttcccatgctccgtgcctccatgcctgcggcactttggaaggacgttaaggcaggacatctttaggagaatgtctttattgactttgtctttatttaccttgggcctggcgctgttatctcagctgagtgtccgtgtttaaaggcgacacatggaacgagcatggctcataattttgagtttcttcttctggagccttactattatatgctcagaaaccatctctgtctgcgtggtatctctcctctggcagtgcagtaggtcacacatcgttgaggttatgagctttggagactcttagacatcagctctcatgttaactctgtgattttgggaaagttgacctatatgtttttgttttctttagtgtgaaacaggaatgccttctgcatagcgaggctgtcagaaaagcccttgacactttctggtcccagagagggcaccgcagccacccaggcctgcccgtgagaggtggcagctctgggaggaacactccttaggccggtgtgtggtactgtcaggtgcttatttttgtttcacaaacttggtatttattaggtgttccaggctttgttcgacccgggtgggagggaggatctttgttggaggactctcactttctaattgcgggtttttgttctgaagccatagggtgtgttgccgtctcagcagggaggagtattccccattaacgggcaggtggcatcgtgggagaagcacctgctgtgcccgggggggcgggactgcgcaggatcagggggatgcgcgggagccagtggtgctgacactgcataccatgtgtcaggagccttggaagtcggcttaaatggtttaatctgatttaatcttcacaaaaaccttgagggataggcattacgattaggcaccacagtagaaactgaggcatggagaggtgcaacagtttccctgaggtcacacagctcttcagagggggagacaggacttaaacacgaggaggctggctccagggcccgtgggctttgagcgaggaaggccttctaggtctagacgttcctaggctggggctcagtgataccctaaagcccatgcacacctcctcagacctggctcctgagaggcagtcctccagagtggcctctttgctgagactgtgagcctgggcttctgtctctaaccactagctacaaaaggatgctggacagacatcctgtacctagggacaccccatgatggcttgtcccccgaccacagacaccccatgattggggataccccgtgaccatggatgccccataaccacagacaccccacaactgggcagctcaaggcagcaagtgccttccttgtgtgcttccgttttgttgaggtctttgttgcaaacatcgtttgttgagggctgccttacccttagaagacatagtaccatttctgggaaccatggttgctgttgagaaatgcatccttacacgcccagatccagccgctgtctggtcccactgacatggcacaggaatcaaagcaggtgcttgggggatgtcaacagttgaatttggattcctcataaagcaatgttagcacatgacactctgtgaggaaataatgatgctactttgtaagataagaaaggggaaacagctgcgttggtggataattgttaacggtgcagctgcagtgtgagttgcacactggaaggtgtttgccgtgacctgtcgcgggctgagctttttggtagcctggcattgtggtggatgcctttcattccatccgctgtggctgagttctgctttcctgcccctggttctgcagtggcgtgactgggctgcttacaggccctgtctttccaagccaccatttaattggggagggctactgacatggcaccattgaacttgagacctgccattcctccggtggcagtccttggagaacagggccccaggtctttctgaccccacatcattggcatggtctcgcagccaagtaggttatgttttctgaggaaatcatcatgtcattcccatctactgttaatttttaaaaagctgtgattcctgatgaaacaaactagagatgatgcaggaactctggatctaaatggtcagtcactatcttctgcaacttgctggagtgcagacacgtctcagaataagatattctcagactagtcagaacattgtttcctttctttaaaaaacaaaacagaaaaccactgagcccagagttcaaggcctcctaaagaggaagagggctttggctacctgcagataagaaaggttttggtggtaatgctcaagtgtgagttaggtgtgggcgtgagcatgcccagtggccgtcccgtcctcctggagacaaaaccatttccggggtatcccctggctaagcatttgaaagcagcaatttattttcaacagtttctatccttaatatttaaaaaataggaaagtgtactcaatcagctttctgttgactttctgctgcctggccggcgtcttgtaggaggcgctctgcctgtctgtgcaggaggctgtccagggtgtgcgagccacgtgggccagcctctgtgggcggactgtcccaggtgggtggtggtgagggggtgaattcctccttcacatttgcttacaagtgctccttttttgagtgttgggagcacatctgtgtatgaaggacatcattcggacgctttccagggtggtgggaagcagcctcccttagcccggctacgtctcatgaatgtgcgtggaccccgcctggccttctgcccgacatgtactccaccccgccttctaccaggagccaaggctgtgaccattgtgatctgaacaagccgttgagagtgtgctctgttgtcagtgaattagttcagagagtccctcctcgtgttatagttctcatgaccactgcgcagtgttgctgtgctctgcctctgacgggtggctgccaggcattgaaaaaataacatcgtaagtccttactgctaacactgacttttaaaaacatttaattgtgtgccttttaaacttttgttctccgtacaacgtcttcccgatatttagattttaacttttaaaagacagttacaaattatttctaaagtataaagtctggttgttgtttttttttttgatggagctgtgaggaggaaaaaaatgagatatagaattttagtgtaggtgatcttgtgctttaggataaaaccatttttctgttactgctttttggtatctaaatccccggcagtttcccccttcggataaagcatcatgtaggttttagcacaccagcgggttcctggctctttagtgaaaaggtggctctgaggattgccctgtgcccgccatgaccatcctggtggcttggcgacttcatattgactgcaggccctgtggacagaaagaattatttcttttttagagaaaagatatttatgaccgaaaacagtgctaaaaacatgagaatattgatcatggttttgagagatgcttgcactgaatcacttgatatacctaaatatcggctttattctatcttccctaaaagacagattgccaacacaaaagatgaaccatcttgagggaaaaaaatcttatatctttctgataggctgtcttgcttccttccataacaatggggagaaaagaagtctgtgtggtttcctgaaataagcaacaaatataataaatggtgtatcggaagcttctgtaaaactgccttgggtgtactttatttaacttgtagtaataagttaaattaacatcaaatggaaattcaaatagctaaacatttaaccaatctaacagtaaacaattattctaaaatcaacataaaaataaagacccattatcatcagaagacctaattcattgtttttagaggtaatctcttggggttctgtggaaatttataaaggaatgagtgaggctaattatttactcatcagatttttgaaggcaaatacttttctgttattcttaaattttagacctattttggatcaagatggtgtgttgcttttgtagtttaaggtagaagatagtgaggctgacttccttccttatcccgggtagaaagcctgactttttctggatagattgcagcctaggggttgtggttttggtcctgttctgcccttttcccaaattcttcttcattgcatctgatacatcccccttgcctgcagggcagggccctgtctctgtggcacacatagcaggaccgtttacatttcctctgctcacaggtgccgcccacaccttgcttcctatttcatgtcctcctcgtctctgtagttgagggaagagtattccattcaacagatggaaacaccattgcatctgactgccatgtctttgaaacctgccagaccaagtcttgactttcgttttgttttttttggtggagctgggaggagacagatgggccatacagtctatgtgtgggtgccttggtgtgggacacaagaaagtgaggcaggacgtggagcaccaggtcatcagagctggcagaggctgctccaccgtgcaccgaagacttggcatgtcagtggagccaggaagtctccgatgcagaagcggaagtcagtgtggccacaggagcgaggtggcaaagtgctggccttggaggaagagagaggtcagagagtagacagagggtgaggcctggatcatcatcagatgagcagacatgaaagccgctctcaacaggattagaaaacacagtttctaggggattcttgcagggaaacagacatggaggggcaccatttggtttgtaaaaggaaggtatagccctgaagttggcaagctcttggcctgctggcctgatgcagcaggcagctgagaattgcttggcctgtccatgggggcctgacaggtatctcaaattttaattgccagcacacacgaatcaggagatttcatatttcaaaaagcatgtatggctgctgtttcttttttgtataaggcttaatttgttttttttttcatgttatagctttcctgagatacattttacatactctaaaatttacccatttaaattgtacagcatgctgggttttcatgcatttatacagttgtgtgtccatcatcacagtgtaattttagaagatttaaatctccctcttccccactgcccctgccaaaaaagggaccccagacctaccagcagtcatttcccatccccctccctctggtaccagcccaccactagtctgtctgtgtctgtggttttccctgttctggatgttttgcatcaacggaatcctgcaccatgtggccttttgtgcctggttcctttcccttcgtgtggtgttttcaaggttgctccacgctccagcatgtgtcagaacttaattccctgcggccaaacaatatcccatcatgtggatgaaccacattttgttgatctatacatcagttaagtcagtttcgccttttggtgttgtgaataaggctgcagtgaacatttgtgtatatatgtgttcatttctcttggggtatatatacacacacacacacgtaggcctaggagtaggattcctgggtccgatggcaattgcatgtttagcattttgaaaaacttatggttttctaatacagctgccccattttacattcctgccagcaatgtatgagggctccaatttcttcatatactcaccaacactttccatgttgtctttttgattttagccatcctaaagggcgagaaagatatcttcttgtgtaaaacgggcaaataatcaagctgggaatggtaagcagggtttttattcacaatagggctggttgatgggattcacaattacagaaggccacagagggaggacacacttggtgtactatttctttttgtcaaacaatagcattattgagatgtaaatgacatacagagtatacatacagtagttcccccttagtcatggggaatatgttacaagaacaccagcagatgctggaaaccgtagaaggcaccaaacccttggtatccctgaggggttggctccaggactcctctcggatactaacatccgcaggtgctcaagcctcttatataaaatggcatactattcttatatagcccagagacaccctcccatattttttaaatcatctctagattacttatgatacctaatgcctagatatcacttcattcttgtgaattcaacgtagtccttaacatatagcaaattcaagttttgcctttttgaactttgtagaatttttttccgaatatttttgatctgtggttggttgagtccgtgagtccgtggctgtggagcccatgcatatggagggccggctgtgcagtatcttttcctacacatacatccccataataaagtttactttgtaaactagcccagtgagattaacagcagcagtctatggaaccattataacaacatgccagcatcactattcttgcacttcagggccattattaagtgaaatgtgggtgacttgaacacaagcactgcaatgaccttgatagtctatctgatagataccaagatagatggctactaagcgacagaagggcgggggtgtgtacagtggggatgcaccggacagagggatgattcgtgtctcaggtgggatggggcgagatttcatcccactactcagaatggtgtgcaatttagaacgtatggattatttatgtctggaattttccagttaatatttttggaccacggttgatctcaagtaattgaaaccatggaaagtaaaactgtggataaagggggccactgtatctcacatatacagtttgataaaatttgcctatggatgaccccaatcaaaataacaaatattctcatcacccccaaagtttcctcttgcacctctgtgattcctctcctcacctcaacccgctttcctttctcatccccaggcaatcactgatctgctgtcactgtgcattagtttgattttctagaattttgtgatgcacatatatacatatatattgtattttacacaaaattttctcgttttatgaatggaattataacgtatagtctcttcgtgtctgagttcttccagtgtattgagtttgatattcatgcatgttgttgcatgtgtcagcggttgattactctttttgctgagtggtattccattgtgtggggataccacagtttatcattcgtttgttattgtacattgaatattgttctttctgctttcggctgttgcagacactgctatgaatatttatatgaaagacttggtaaggacgtatgcttctaattctcttaggtaaacacctaggagtggatcctatgggcaatgggtgtttagcattttaaaaagttgccaaactgttttccagagtggctgcatccctctgccgtttttatgaacagtgggtgggaatgcaattcttgcatatagtctctgatttcatatcattttccttttgcctggaagacttagcatttcttctgtggggtctgatggtgatactgtcttttagtgtttttaatgtctgaaaaagtattttcatatttaaaagatatttttgctgtgcaaagaattttgagttttctcttttccttttcttaaagatcttgttccactgtctctgacttgcattgtttcggaccagaaatctgctgtcatccttattttccttcatgtatgtggagcattttcccccctccaggggtttttgagttatgttctttatcgctggctttgaccatctggctcattttttgggttggtgtgcttgtcttcatgtgtctagtgcttgggcttcattgagtttcttggtgccatcaattacatctatatttgtctgttttaagttatcccacagttctctaatattgtgatttttttgttttttttgcagtgttttattttggtagtttctattatgtttttgagttcactaatcttttcttctgcaatgcctaatatgctttgaatgtcatctagtatgtttttcttctcaggcatggtgattttaatccataaaaatttgtgtcatttttatatcttaatttttctttttctttttttttgagatggagtcttgttctgtcaccaggctggagggcagtggtgtgatcttggctcactgcaacctcctcctcctgggttcaagtgattccctgtctcagcctcccaagtagctgagactacaggcacaacccaccatgcccagctaatttttatatttttatcatgatccacccgcctcggcttcccaaagtgctgggattacaggtgtgagccaccgtacccgacctatatttttctactcacctttttgacatgtgaaatacagttataacgactatgttaatatccttgtctgttaattctaacatctttgtcagttttgggttggttttgatttttttctcctcctagcagttgtatttttattcttttatgcttttcttgtaatttttgaatggatgctttatatgcaaatgttacctggctgggtgctaggttatttatttaataaatatcctttagctttgttctgggaggcaggtaagttacgtggaaatagtttgaatcttttggatcatgctttgaagattcactagttgcaactacagtggtatttagtttcaggctaattattcccacaaccaaggcaggattgtaagaggagagatcatggccggggactcatggctagacaaaaaacaggacctcagtcctatcagtgcaaggaaatgaattctgtcaatacatagtgagcttgaaagagactcgcagcctcagccctgggagtctcagttgcagctgacattttggtttcacccggagaaacccttagcagaggactgagtccacccgtgcctggactcctgacccatggggcggatgagacagtagatgtgtggtggttaaaccactgaatctgtggtaatttgtggtgatttgttatgcagcagtaagaggtaataccgtatgcatcttcttgcatcatttaccagctttttattatatgtggaagtcttacgtctttcctcccttttttattgccctctgagtaccttgttgtccctttctgtgtcacattcttcccactcgcacgcatgcatccaggaataagagcactgtggctcggtgtggccaagacccactgtgtaccttccatgaaagatgtttgtgagtagcatgggcccccgaaccctgggtccagtcctgcctgtactgcgagccagcactgtcatcatggatagtgccctcagcccatactctcctctgtgaagtgtgtgtgccagcacactgacatcacagggtgcctgcagcatttggaaaacacgcagcatcatgcaaactgcctaggagtgctcaacaatttggagctggtatctttacacttaccacgttgaatattgcatgcagactacatatttgcagagcttaatgaacagagaggcattttaggacaactaggagaaactcgcgcagattcccctcagggggagggaagctgttttgtaggtgtctctggcagtagcctaatgcagttgctttagaccctggtggtctggatactgcttcactgtaggctttaattgcattgctccaggtctgtggaaggctggaagaggccggtgtttttgtgtcacttttgctaccccctactctctctagttgacaggccatttggagcaccagggagtacaatctggctgaagaagcggtatccaaggaggacgtcatggtgtctgttctcgcagtcatggagcctagtgccaacaggccttaattctgtgttctggtgtctcatgagtggctctgcagtgggacgtcagagcagccaggcctcaagccgcctggctggggtggggacaaagtgtgtgttgtcccttcatcacgggagtgtggggcctggcacacgccctgccagggcctcacttgggccatgcctcagagcatgggtgctactcacctctgacctcttgagttttgcaggcaaactcaggtcgaatttggattctcagtcgcattgtggctcacatgacatgaaataaaatgttgacatttatttgcttcttgtggcctctactaaatatataaaataatcaaaactgaaactttccattattctcagcaggagtgaaacatcttgactttggaaatttttcctagtgatttaactcaagtcggatatcggcagcaccacctgcaatagtgaccccctatggcctgcggcggggctgcttaacgctcacatgggtggtcaccaaggaagggctgctggacaggcagactcccagagcagttgctacttacaaatccagcttccagcagggagaccattaaagggctgcttccacctccagggcgggcagtgaagcctccagctgggagccgcgtgaaaatcagagccaatgggagctggcagcccatccaccaggagggtccagaagacagaggcagaggacgtgggatctggagcccaagggaggggtcccaggtgggttgaggctggagatggcccaggaagccctggtttggggtgagggtgggcgagactgagaggctgctcagacaggatgggtggttgaatggagtgcggatcatgagatcatcacagggccacagcatatcaggccatgggttccctgttaattcctctcccacctcgaggaccggagcttctgttaggcaggcgggggctctgccgcaggcccacattctctgctaattcccttctctcctaaaggtttcagatctgtctgtggtcttttgttttacttggaaacacatgtttaatatatcttataaaatacgtttaatataaaaatatagttcactttatagttcagttgctttgagcacatttagtaaaccaagatgtgcttatatgaacttttccctgaaaagtacctggatcccagagttctacatggattgaatacttatgtttcgattttaattccttagatggctaactcagcattatttaaattttaataaagagactggatacaatgtgagcgaatttctctctatattttgtgaatctctatcagagcaaaataaaactgtttctgttttgcaatgaatagtttctagccatggaattgctggtcgaggcaagaaagtatgaatcttatttttgtggatctagccaagaaaaagaacgtaaactttgaaaagtatgtcatttgccattcacagtctaatgagaaactcagagaggctagaaactctcaataaaaattctgatatcagcatttaagatccagcaagatagggtatacgggcatttaagggattcacaatccacagtttactggcactttaaatgctgtgaatcttgtactggcaatcacaatcttgattttattaccgagggggacccctcgtgaggaatatgtcggtgcagtgtgcaggttaaactgtgagctgctccagcctctctcccgccggctgacggaaaggtggtcaaattaccttcgcaaatctgaagggtgcttggctccagcaaattggccatttagtcaaaaagtgtctgaaaatgacgtagtcgttggaagtgtttgggaataagcgatgagttggccaaacgcagtgtgttttctgtaggcaagcacctgtggcagctggcagggatgggcaggcctgcagagatggcttcctgggggcgcagcgtggtcaggcttgagggtggtgacagtgcccccaggagaaggcgagactggccagaactgggacgggcatgatgagtggccgtgtttcaaatattgtccatttttaacttttgaaaatgccaaaagcaagtatgctgccttgtggaatctgtgcaagcagttctttccaggctgaccttgaatagcctgacagcagagcgaggagtgaaatgagcacgcctcaggctgtggtccactcgtgcgggaagacatggacctgctactgctccctgccctctgtctccccaggaaaggagcattctggctcagagattctcaaactgggtcttccaagaccgcacaggtgctgtgtcaggtcagagatgcctctgtaacaacgccaagacctcgcgtgtccaagagtgatgctgggggaggctgctctagctggacctagatccaggccaggccccagacctctgcagctgtccacctactcctcaccaccacgcgtttgcaggtggtggacggtgttttatttaagaatgtccttgttggccggacgcggtggctcacgcctgtaatcccagcactttgggaggccgaggtgggtggatcacaaggtcaggagttcgagaccagcctggccaacatagtgaaaccctatctcttctaaaaatacaaaaaattagccaggcatggtggtaggcacctgtaatctcagctacttgggaggctgaggcaggagaatggcttgaacccgggaggcagagatcacagtgagccgagatggcgccactgcactccagcctgggtgacagagcgagactccgtctcaaaaaataaataaataaataaaaaagaatgtccttgttgaagcaataaacgctaattgtactacaaactgaccctggagcacctctctttttagtagacacggggatgaagtgaagtgtgcgtaaagcacttctgccatggaccaaagcagggatgttttccggaggaagggtttgcgtgtgactcagggtgacgggagtggccacttttttcctggaataccattttcaccattgaaagtatcactgaccagccaaccatatttacccacacttgggtttttggcagaaattttcaaggaaaatagctgacagtatttgttgctagtactgaatgatgaaatctgagtttcaagtgaaaatcataattttgagaaacttgcacctactgccgtgagcttaacagcatttcaatgtttaaacaacgttttgctgataccagtgtggcattaactagtgtgaatttcggtagtgtgctgtggctgaaatgcctaacgtagatttgcatacctcagtgaaccagtattttctaaatgatggataatgttataaaattatgcctgggtaaaaatccaaaatgcaggctaggtgaatggattttaatggaaccgtgcagacagttgattcggaaggcttcagggtccacatggaaactgtggtttgggagctgccccttgttgagagttctgttcaggtatcaaaggagagtatccacagtggcccaaggtagattttcttcctgcacgtcagccagagccctgtatggaaacagactgaaggcagaagcagctgcgagagtccacctgccttctgttaagccagctgtggaagacagtctcaaaaatgtaaaccagtgcaactttaattaatcctttttttttttggaaaaatggttatttttcatgaaaatgttatatgtgataacatgaaatcagttcataactattttgaaatgaaatatttttaaatgttctcagctttcatttcaaacacagtatcaatagaaataacttgcatgaggaaaaaaatagctctttagagtcctcatgatgcttaagggtgagactgaaaagtcagacacccaccgccccagacaaacaccatggtggcctcggggatgctgcgaggtcagagaacctgcactctgcttccttcttgtgtagggtgagggagaagccccaagccgtttcttctcagggctcaggtgtctctcatcagtgtagggagggtcttcgggcatcctatgccctgctcattccctcgatgttatccggacaggagatttcagctcctgcgcagtgggcgctgttgggattcccaggcctccaagtcatgacggtgggtgaaatggagctggtatttgagaaggctcggaagcctccccttagaaaggtgggtcctgatcagcagtttgggatgcccctgtgtttcctgcatttgggatgggcggtcctccctcctgcctccccagctctcttgagcacagtgtggccggcatctggtcaggacttcagagtggccagccccgtgttgccgacgaatctgagagggagcccctggcttcttatttttctttgaactacgtcaacggaattgcttcggatccttagccattttaaaaaacacagtcatatcacgtccccttctgacattctcttaagctttagcaaataacagaaatttcagtctcactgtgccttgttcagaggtgacaacaacaatgggtggctgaggcgtaagtctcaatcatccaggctccttaaagcagctttcgggcatgtgtggggaaagtacgccacagacacccagggctgtgcttccaaagaggttttcaagaggttgagtattgacacctttccttacaaggtagtggggaggcctggaggccaggcagtgaggcgaacagtgctcagtgaatccacgctccaggtgaggggaggcaaatgtcggcagagaaggtgggagcagaggaggagttccttatgcagaggtctctgggcaggcagaggaaatgagcctcgactttgctctgccctgggaagggaagcttgtgatccacattatatcagtgtggggttttatgagctggactgagatggttgatctaaagtcacagttggcaagtccctgtttatgcgaggccggcaaagaattcacctctgagtgatctgtgggggcagccctgtgttggtgcctgaggcctctgcctttctgtggaggtctggctgatgcatgaggctagaaacagccattcatttggaagagggcgttgcaatgactcagcctctgggcttaagctttccttttgcataagaagtctgaggggtcctcagatgttttatcttcctttacaaagttgtgttgtcaacaccaaggaaacagtcttgattctgaacaaggaggtagcctgggtactgaaggtgaaaagagctcagatcagaagtttcttggaaagagatttaaagatttttaaaaaatcagattactaaggcatattaaaatatgttcagtcttacactgtgttctttgaaaccttgaattactctagcaaaaggctcagagggtactgctatgagaagctggatcttggacatctctttcaaatgcctcggtacctttcaaagggctttggatggaatgaagggacaccattgggtctcacagctttctcctgcctaacataccacagcagtgtatgaaattgttcccatcagctccagcgcgtgaaagacaatacgaacagtaacacccccaaagaaacagtggggctggagacagcagaatccttggagggttctctggctgaagaaatctctctcctaccacagatactgtccccagagaaggtgcacctctaccaccaatgccctccatcctcagttgacaaggattcaaaaagtttgttggtgacgctgacatgtaatattcccctgcgagttacacacatccaggtgaccttcggaccagcattgccggcacacccgtcacgccatcaacctgccaggctggagaagaccgctcagagcttttccttgactggggagaggggagccggagcagcgccccacgtctcacggttcacccctgccgtctctcggggccttccttcaggctttccctgtatcctcagatcttcgccagggtcctgtgatccagtgttagttcattccatgtgtcatatatgaatgatgtcatttgaatcatttcaagtccttttgtaggaaaactaaggcagaaaggccagcaccacaaagaggcatccagaattctcctcggcacaggagggtgcagccatggtgcctttgaggagacggacacgcttagttccccctgccatcagtgggcatctcgatgttaaccagatcttagaaattgctctgctcaggttggactcataagtgtactcttagatgcattcttccatgtttttggaatttcctagagaaaacgtcttctttgttcatgcccgtgacacacgttcctccctgtggtgacctggcgtccatcctgagctttcgtggtgtccacccatgaaaacaaaggtgtctgatcccccgtgccacagacatactcttaaccagaatctcccaacctggggtccgtggtggtcttcgggggggtctgacactacccagggtcagatgaaaagtgttgactggatgcgtttatgtgggcgctgcgatactcttcttggggcggggcccagagggttcctgaaattctcaaaagtgtctgtgtccctccttgtgagtaggagtcactgtttcagatgctcagctttccaggtgatttttcaaatccctggcacaggctttcaaggtgacttaagattgtctaatcctcctgcaggtagaaatgagagtcatctggctgatggtcacgagccgtcggggagttcctcctgtcttgcactcaagcagaggagtaaggagacccctttagaatgtacttctaattgttgaaaagcacctaacaagttttctatgggggagattatacagggactgggtagggacaatcacgtaagacatacctgtttatagaaagagctggatatagaattataggtgggttcagctgcacaaagaagagtcagactacggaggcttgaaggagctgtgaatacactgggcatctgacatcattgcttacttccccctgccccgccctgcccctccctgccccagggtatcggtagcatgtgtcctaattaaattttgacattatgtgagttttagcatggtattttctgcattgggctatctgtataatgtcatggagtggtgacataaataatgctagacttttccaatttatctaccatcccagccccctccccaactcagtcatatgtggaaagtcagtttctttttccatttattatagttgttaactaaagattaaaattttacatttcattgcactgttcataaattgtttataaatacagtgaaatctaagcaaaccaagatgatcttggaaagaagtgttctgtatggaatttatctgttcagacccaacatgcacacccttccttcgggatgtatcaccaagatgaaggcgggcagatctcatgggcatgagcttgtgtgcaccgaggaagttcctgcaagcagtcctgctgcacctgggcgggggacaccctgtggagaaccacggtgcttgagtggaaggagtctgtgtctgtttttcagaatgccttcttgccttcacaactaatatgcaacaaaaataataggattgcacctgcttttgatgcctcaagatatgcagaaatacatttccctcacttgagcatgtctctggatatactaggacagctaggtcgtgcttgcgtttcaggccacggccctgctcaggagtcaggttcagcttcttgcattgagtcttatccgccacagcccaactttaacagtggatgatagccaggaaagagagggaagcatttttggagctggttgtggttttaatgaggcatatacagacactgctttagtggatgtaggagtgaggggggtggggtgtagtggttgaggaaggggcttagtgggctggggtgaaggtctctgctggagatctaggagttttccctaaatcctcatctgatcttcctctcctgtagattgttaggataaatgagcaagaagattctgcgcaacaaactgataccttgctttcttttgtgagcagcagagctggggcgtggagagggtacgtccagtgttggatgtcaggaagttcacgtcccagggtatctagtacatctgagctctaagcctgcaaaggaaccttctttacaaattgcaccattgttatggttggcattctggttaaaagttcatctggatctcaacctcgcgtgaaattgcagagctacgactggaaaactcggcatcagttgagaacctttggggacttctcagacattacagttagaattgagcaaaacatgctgagttccattcactcacattttggtgagtgggttaaaataacagtttagtttcgtcatttttattacctacttttcagacagatccagaaaaataaaaaaacaaaaaaaaagacaagcatcattaccatgtttaggaaatctttgagaagaaatatgtatgaaatttggcatactggctagccattcccttacccccttatttttgattatccaaaagctcaaggtgactttgctcttcccctctgtgactggggttagcaaacaacagccatgggctagatcttgtccaccagctgtttttgcatgatcaggacgctgagtgtggttttttcattttttaaagggttgtaggaaataaagagactattgagtagagacctcacaggccttggaaagtgtgacatacttcctatctccttctctacagaagtggctgctgactcctgctctttggggtcgaaacacaaagactgaataatgatgtggtatttttgtatttaaaaaatggcatagggcatttttagggaggttgtggcattgacgtattctgtgttgcttcagagagatgtcgttcggtgggtagaggctgcgcagtggcccactgtgattggcatggtggtggctctcggcccctgggcctgctctgcagtcaggtccaccatgtggaagtgctctgagactcggtgcacgtattcaatgtttagtgtgtgccagccacgttctaggcaccgtggatgcggccagcaaggaagatgaggaccctgttctcatgcccagcctcagggtgggtgcatggagcatccctggtcgagtgtgtgctcaggattcctttagtatgtcatgaatctgtcgtgtttctcagagcagacttaggagccaggctccctgagattgaaccctgcgtgggccacttctttgctgtggaaccgtgggcaagtctcttgttctttctggcggcttccatctgtataaggggatgatagtgccaatctcttagcgtaggtgacagattccgaagtaaagggcttgtcaagtaggcctggggtgggcctggcacatcctgggggtgctgcctgagggtcagatgtcatcttggtggcccacactcccctgcagtggtgctgctggttcaggaagttaaagtggaaaactgtgctccggaataaacacaattgggagaacccaaaaccacacgcaagaaagcaaaatgtgctgcccgattactaagcatggagttaaactctatttggtgtttttgttctgaattgttagggagtaagaatatttatggttggaatccttggccaatcctaaattttcttctaactagtagataattaagtgtctgcttctagaggatgtagatgtgcttgtcttgtatattacaaagtagagacgacttgcccacaccccctcctgggctcacactccatgcggatggcgtcagtagcttctgagcctcttcaggtgctgaacacatgccctgagctgcttgttttgacagggacatcatttttaaagagtcctttattaccccagtttactcacctcttgttgtctccagcccttcccttttttatgttcttctctcccttttcccttagcaattgctaataccctagttggtactgataaaagaaaaacttaagctgaattgaatttaaaggagtttaattgagcaacgaacaattcgcaaatcgagcagcctcccaaagccagagtaggctcagatggacagaaaaaggaaagtgacagagacgaggcacagaaacagccagattggttacagcgtttgccttatttgaacatggtttgaacagtcagctatattggattggccaaaactcagtgattggcacaagagtaggctacggtctgtttatacctccacttgttatagttcatgaggtacagaaaaaccttgaggccacattcaaaacatggaaggaggcagctttaggctaagcttgattcaacaggttgctctcgtcactaggaagtagtcatgtacaaatgcaaatgtgcttgaagtttcaacctagtttttagaatgtgggatcctgatgggtattcctctcatcttgctgcttcttgtcttgcgcatttatcatcccttcgaggcagtggtttcagatcttaatcctttttcctagtcacctaatattctaagatgtggctatacaaagcatttccaaccattgtccttcccccctcaaaaattatggtaataagcgtccttcccaccccacagataatactgcagtcagtgcagacatatgcttgtacatgctttcacacacgattcactgaggccggcaagtctgtgggagggagttctataactgaatgtttacacagggtgtgcatatctttctctttgaataggttgtttctatactgtttgtcatgaaaactcagaccattcccattttaccatcctttcttcaccagggagatagagtgacagagcaacttaattgttgcccatctgatgcggatcaagtgtcatattaactgtgcatatccctgcaacgtttgcacactaatgtacattggtctttctagatgcctgttgttacctataggtaagtaggtaggtaggtaggtaggtaggtaggtagatgtctgctagcaatttgacgggtcatttctttttgaaggataatgaacaaatttgaaacctgtggcacagcctgggacctaagtctgtgtggtgcagggagtctaacttctgtctaagtcagtagtatctccagggatacagccttacatccactgctggctgcggcttctctgagcgacccatctctgcgtccgcccatccatggctgccatctcgcacaaaattattttcctgggatggtcccttgagttagttcgtggttaggggtagctctcaccttagtccctacaaacccacctgaatttcctttgtctccgagccacatgggaaggagactgtggaaaataaaccaagagattctctagtaggtagagctagaggcaacaggttaaaatcacatctttataggagaatgtttggggaatgcattcagcagtcacccattctcattaatagacccagaaaacaattaaaaaatacacattgtgatttggactgggcagacatgccgactgtggagccatttcttaagagagggaggttggcaggtagctggtgagcctatttctttgctcattgagctagcaagagcaacacccattactttcattggattacttgtttgaaaattaaattaatcaagtgaggtaaacatccgtattgcctcttagcacccccataggctgcccgcaaaatggcctgcgtgggtatcctaagagcaggaattggctatgacctgccgaggtggccaactcagatgtggccagttttccatacaagtatgaagttcctgaattaatgggaaacctggctgcattgtctgatggcttactggcaagcagtaattagaaaacatttttcatagtggaacctcaggtttagctatccagagaaattggatatttcaaaatactcctagttggttagtgaaacattagtattaatgacaaattaatattaatatcaatatcagagttgagtatgtagcctttgggaagagaagggaaagattttaaggaccagatttaagtagcctccatatgcctttccttcttggtggcatttttcatctgaaagcattttttttttttttagctcaaaaacttagatgtgaaaaattcaacgcattgggaagaggcgtcaacatttgaaccgcaaatgattaaacctttatgactaaagtaataggtttggcttcagtcttcccagtggagtagcaagcagaggtccttttcagtttgcaaacagtagtatacaaacttggtccatatcaaatactgtttctcttccagggcttgtgtgtgcactgggaacagcaacaaaagttgaacagcaactgggtggggtttctttatgtcttctgtttaatcagagtttcctgatggtttggccacttcattctcctttggcttaaggggttctaagccatggggcagaccttgggtggctcactgctcttggaaggagggtgtccagccttcctggcagtgtggagatgagtaagggaaacactgcaggggcttctggcttcctggatcctgcccctcacctggggactttgtctaagtcctcatcctagcaccacctcgagatcgattcaggcctccccagcagtggcagaaatccaaccatgggagctagtgggttccattactgtggagtagggaagaagacatatgtcccttctaagtcactttaatttggtccaaaataaataaccaaagtccttggggagaccgtcagggaagtatcttcccacatcacacttggtctttgcaagaagtgctggtgggcgtgcagggcttcttgacacttcgcagcaacgtaaggatgtggtagtagagtgcttggtgttccagtggccactgcaatacaaatagagtgagttttgtcgccgtggtacattacagccatggaaattccccgtagttcattggtccgtgaccaacaaaaatccccctagactaacaattaatcaggctctgctgagcctttgactggcgacagttgcagatgtcacatcatgcgaaaagttaaatctcagctttccccaagaaggaaaaaaagtttatttttacagtttatggaactagttttccttttgatcaaatgacctggtctttaggggagaaatattttcatttttatgttagcaagtgtgatacagaatcatatacatttaaaatcttcatttttattgctttttttttaaagtacaaaattttaatagtaatagtgatttcaagaaaatgttgtgagtgtcactttactagtcaggcatgttgaaaaggaacgcgcttcctgaaatctccaagcgaggttggcatttgagacctctgggtacgtgagcttaaaattaatataagtacctgagcctagagcccaggaggtttagaaagactcagagatgcgcttaaagataattggtgtgctcctcttgtgagagcggattcaccaaaatgaagttaaaatttgtttgggaagttgcttgtactgtgccttgtgaacttacaaatctgtgtcacaatccaaagggttgagagccacacaaagcaaaacagatgggccgtgtgtcgtaggatttcctgctgtcctttcggcttcaggtaactaggacttgtgaagcacaagatacatgggaggcaaatctgaaaaggaatggtgagtgcgccccacgtgcctgggtaatacctgagtgctcccggcattacctgggggctgccaccctccctccccctccttcctttccagctcaacattgaggtgaactttttaccatgatcgatgtagctttctggtgtctacacagatttctggatggcctcagaaatgtcacatactgcttcgggaatgtctgcaagtatatttcatacattttacctggcaattaaaaaaaagtcatctttaagatattagcatgtggataccgaggttccacacaaagcaaacaaagaggtcattcttagcagctaattttaaatcttcaggcaactatacgaacctatgtcacagtctctcccaaaatttattataatgcccttgttataaatttagaatatttttgcaaactcatataaacaagtaattgatgcgactaaaattcttgtcacatatttattgcactatcagctaaaatttttaagtgacaagaaccaaaataatcgttaatttttatagggcaaggatctggctttttgtctgacacaaagctgtataaaaaactgcttctgattttatgcacattgtttttagttaatgattttcagctgtttgttgtttctctgatagcatgaaaatgtaccatatgctcagcccaaagacagatgattagcaagtgagattccgggcagctgtctgactgagcgcgttgggttgatagcattctgctatcataattagcttaagctttgggttaattaactttctacctggatatgcataataatagcaaactgcaaaaagcaagaagctttcagtacatcaacaacattgctgtcttttttatttggtatttcaagagcatattagaatttcaagagtgattaatcctgggaatattgtcatctactgtagattttatttgcaagccagataatactgaaacaattggaatctattatagagcagaaatagcattttaaaattgtaattaaagtttctaaaagcaattgctaatttcaaatgcctttgttggcaagaatattaggcacactgcttcttgtatgggcagcttgtcgggcacaaaaaataccagcacttacactgtgaagaataaaactttcttttatttaagggctgtattgaaaataatcagttatttttatgtaatttgaaagtaagattactctgtagtttgcagaggtgctgttcagactcctagattgaagatattaaccctgtgccctcttgcaggttctcacctttgttacctcctgagcagtggagggctggaggcctgggtaggagtgcctggtgccctcttagaagatttgatgtgtgcgtgtgtctgcgggtgccagaggtcagatttttcaaaagtcagtgctatacatttgtagcttgatatttgttttctaccccaagcagtttctaaatcaatttactgatggtatgaaatggggagagggagggctttgtctccatcctcctccttgtttgcatgatttaccaaagcactctctacgacgctcatcatctgaaggggctgccggggcctttggagagcacaagctagtgaagtggatggtggatttggagtaaaaattgtagtttacatttcccaaagcaccagagagcctagcacttaattctgaaataagtcatgcctgttgttacactcagaaaaatattttatcttctgaaaaaaaaattctttacatatgcagtggatggtgaagatttggtggcggtgaatttgccctggctccagaggactttacttacagaatcagcagtcgtgaaaacgtgctttctcagatgtgtgacttgtggtcagtctgtgggctcaggagcacccatttggtcaatccatgcaagttttatggggctgtcagaagccatttttcaaaattggcttcatctgaggacacgtggaggagccactctcttggtgtgggtagtgaaaggagtggctccctgtggctctgtcttgggagttgggggctgcagtggttcactgggaggagggggtgcccctgcaggccccacctgcaccccacctcgccgccccaccccctccccccggctttcaggctgtgacctcaaggccttttatcattttcacaatgatgtctccaacagacctttaccccagtctcaaaaaagatactgccagagcctgcctttgctttttgtttagtctgcttcgggctgcgtcaataaagatagcagaggggtcaagagaaaagaagtgaacggaatcacagttttggtgttgaacccttaaatgggggccccactgtctctgctgtgtagcaggcacaggattatctgtctgccttctgagatttcttttaatgttttaccaaattaaacatgaacaatttcaggatgcaaaaacttgactgcatcttgttgtttcttaaataagagcactttaagaaggcaatatatggagattcttttgtgggaaagatgtttcaaatgggttattactggccattgaaagaaagaaaaagaggaaatgcatcgaggcctcattttttggcctgcacatttgattattttattttaaatgccatttcaaacatagtgtaaactaatgatattattttttaaaaaacttactctactatttgcggtccttgatctttaatttcttttaatgtcaaaattatttatttggccagttccattccagatgtgactgttgagggcacattaatttctattctgttttcatgggcccctgtccccatctgtacatcatttctgacttccgtgtgctccctagggagttcacttattcatattgtaggtttcatttgctgtgtaaacagaataaacagacaatgcaaaaatccccacaataccagaaaataattcttttcaacaacatagtggatcatatttaaaaaaaaacatggaaaatgcaatacatgtgaagcccattttttccactttattgtcctcccgaggaaaggcttgtgttaccagtgcatttcccttgaatttgataagttcatttttattaaaaatccatcccaaacagcattttacgataattctcaaacacgtgttgtggacatttctttgttttgcgtattagcttggtcttgcgggttaattcggaatgtgttactcaactggtatgtgcttgcgtggccaaaaacacccgttgtgctgtgtgtgtgtgaaaagcaacattcaagaacggtgattttttttttttgacatttacaaataaagagggacatgagttatttatgctccaatgttgctgcaaagtccttatctccatttggcactaaacaaggatttgttgtgggatttgtgagggctgcgcagtgcctctgtgctaagcacccaaaactctaggggactggcactaatttcctctctctcgtaaaacaacgtagtattcataacaactcaagaggcttgacataagtaatgatggcatgtgcaggcgaagattaccacccaacagtgtaatcaaggtgctaggtactaatgcaagttaaattgagacaataatgccgaaacttgcattgtgggattaggagggcacttgaaatgctgacgtgagcacatcctgcctgcctgcctgtctggcgctccgttcctgtttatacttaatgacctcaaaatttgtatgtcgttaacaccgtgtactgaagtgggagagaacacggtttgggagggagaagactccctgtcttcgttgacttttgtctcttttggtaattggtggcttttcctgccgtattagggagcaaagcgtgcagcggggaggcccctgaggtctctgtaaacatgctgtgggcaccgagggcctccgcacccggcgctaggcagtaatttacatactttgaatgaaaagtcatttgtgcctgcaaaattgttattgctggaagaaatttaaatactagtcatatggaaatttgaaataaagtcatattaaattttgatgctcagatcaatattgtggagccccggtaattaaagtgggtttgtttatttggctccttataaataaaaagggcttaatacagactaattacacagaatctttcgtctacggtgggataataatggcagcaatttaaagtgatattaaatgagaattaataaaggaatattgagtcactttgactgtattaagctgtgaaatgattcctcatctcaatttaactttctgtcttgagcataatgtttgataagcaatgcatttttgtaggaataatctataacagtatttgactgcaatatttaataacaactagacttgtgactttatgttgtttttaaatgggctgggaaagcccgttttttctctgcaaatttataggacaacttagagggttcttgccctatggtagcttcacaagagttctgagttggcaccctccggtttgggaggtaggtggagatggctttgacttttgttcaacttacaagggagtaacttcttggaagtgcagtccgggccagcagaaatggtcatagtaggccatggtggaaggagaatcagaaccacgcgtaaatcctcagaaggaagagggcagtcatttttttttttttctcttggaggaatatcccgggaagaattacctggaagaaatcagagtggttttggaagatggattgtcggataacattttaacttaagggctgaagttcctttctacctaagtaccattgaagaagtatgttcctgatcttaaacatttttaatagcagtctaggccaattgactctgtgaccattaagtaattttcaagtggactggctgctgccagggtgtttgtgttttgctttgttttgtttgcagagtaacttgtgtgtaatttctttccactgtgccgcacagcatgtcatgtccacgttagcatttctgcccttttaaagggtcctgctgaaggtcaggacctcacactgaacaccctttttatatatattacaaattgctggaattgttcattaatttctgtctttgaaatgccatgtcaaccctctaaaggaattcgcagtgccagtttcccttggacagctgctcaccatggtccagtgcgaatttctgatgaaattacaggtgcagggaaatgcagaattagaaatatatctgatgttgcaatacttgtgaagctatagctttgttgatgacaggacaattccatttttgacagtttaatttactgttgccagtggacaagagcaagaggaggacgtggggttagccacctgccccctcgtaccgtgtttcacatgcgaggttgccaaatcatgactccctcaacctgtcgggctcaaatgagaaggttttcagctgggaaaatggaatatatcagtgcatgtaatattgcctgacctcataaaacaaaagggaaaattgcagattctgacagccattatgaatcttgtatcagcatccaaaacgacttggagccagggtatagtacatgtttataatagaaaaaaaacggggttgccacgttgacttgcaatatggagcaaaaaatgacttgtcataattcgttctcagatgttaaagaggctgttgaatttactagtatatacacagaagaatgcgtagcccggagcagagtgtggaaatagtccctacacagaggggtctgctgaagttagtcatcgagttagattagaatggaaggcaggaggggaggaactccgggtttgcgccgcagctgcgtcggtggggccagatttctcattacaagatgtactgaacctttccactttcacccactgtaaatctataagtaatcaggcttctaaaataaagcaaacaaccttgttttgagattatgagaatcatttgaattgaatgtattctgttggaaaactggtgtattgaggcatggctttttatcttacgcttaaaaagttttatttatattaaaataaggcataatctctctgcgtataattatacgctcttcgatttagtttttctatttaatagtctattccttcaccttcttgcccatttctttatgttattccttaaaaaataatttctaagtacaataattgtctcagctgcttttggtgatttctttgggaggggagatgtggagtgacagtccaggaactttctgcccaggggcaggaggcccagcgcgtgctccccagctgaggccccgtccgccttggccactccctttcatctcccgggctgaatgcggagtgtggtgacttttattttttcctttgctattggtttagaatgagatgtagcagttgatttaagtgaagtaaagcatgcttacgcagtacactgtgtccctgtcggggcctgctctctcatgtcacctgccggcggtggcatggagacaaagccttctctcctctcttactgctgctgggcctctcctgggcaggtccgggctcagtggcttgaacaggtgatgcagggaggggcagtgcctgtggccacagtgatggcacaggtggacatgatcctgagagtccagtgggggctgtagcacaggaaaggaggttgtctacagcctttctcaccacacctttccctcctcagtggaatctctggccccatctggagtccctggaggctggatggtagaactggaatcgttggcccgatctggagcccctggaggctgggtggtagaagtggagtctctggccccatccggatgatggaggtggaatctctggccccatccggatgatagaggtggaatctctggccccatctggagcccctggaggctggatggtagaagtgaaatctctggccccatctggagtccctggaggctggatggtggaggtttgctggggtaaccctaggcggtaggtgttgccacccaaggtgaagaggaactcacagcagcgctggcttagcagctctgtggggcataacccacttctttgcaaactctggtgctgggagatgatgaaatgagcacctggtacattaggtttgggacttaaagctgatacttccattcgggagcaggatgagtaagacctggtgcttctttgctcagagctctctgaggtgggaggctggaagcgcttccctgaacactgtaggaagtgttgcaggagagcggaagagcaggaggaggaatggtgcagaggaggaggagcagtgcggagatttcacctggggggacaccaccacgggaggcaggcggcaatggtggaggcgttggctgagcagggcctttagaaaaaggcccgggagcttggcagcagaaaggagggtggaagtgcagaagcatcgagatgcccagtgacgtctgtgcagtttggattttgctgttgaaaagcaaaggagatgaatagaaagctttaggcagacactgagagtttttgctttggaggtattttgatatatggtaaactattgtttggattattttggagtatgctttggtctattattaaatatcccagtcaaagatagcagatattcaatatttgagttaggatttttcaaatacttagaatatttgaaaatatttttatcattagaatttattgattttttgagacactatcatattctaacaattgcaccttattctttggcggtatcactgtcattgtattaatggcaaaggcttcaaaatagcctgtcaggcccatgtcatctgcaagtcaaccctcaaccctttctctctaaactcctctcctccagtttgccaaaccactgtgctccagccatgctgccctccttgctgttctggaacttgccaagtatgccccaccccagggccttggcatgtgcctggaacacttgagcccccaccctgcacatggctggccccttgttttcttcagctctccgtccatatgcaatagcgattcctcatgcccctcatagcacttctggactttttccttgctctattttttaccaactaaaacaggggttggccaaccatggctctcaggctggccacctgttttgcaaatacaattttattggaacacacttataaagacttgatttcttatggctgttttccctatgatggcagagttgaatagttgcaataaagtctgacctgcaaatctaaaatgtgtgtaatatctggctcattaggcaaaagtttgcaaagccctcatctaggatatagtgcattcatttgcctctgtccctgactggaatgcaccctcccttaagacagagcctatctctgtttggcccactgctgtatccctagagcctacaacagtgtctagcacaaagtatgttctcgtgagatacttgaatgaataaatgaacaaaagtgaaagttccagccaacaggatgatgggcagtagttaactatgcctctaattctggcttaaactttggtatttcagcctttatgtatgttctattttgcagtttttatggtgcacaggatgaaagaacacatcaactcctagggagtagaggaggcctggaaatagactcagatgcagaattgtgtgcaggtggctgttggggagtgtattcattcattctcacactgctattagcatctgagactgggtaatttatgaaagaaagaggtttaattaactcagagttatctgggctggacagacttctgcttctggagaggcctcaggaaacttacaatcatggccgaaagcaaagggggaagcaaacacatcctcatggatggagcaggaagaagagagagagtgaagggggaggtgccacacactttcaaacaaccagatctcttgagaactcactcactatcatgagaatagcaagggggaaatctgcccctgtgatccagtcacctcctaccaggacccttctccaagactgaagatcacaagtcaacatgcagtttgggtgtggacacagagccaaaccatatcagggagtattcccaggatacactctgtaaggaagtgcatactgcaggatcgggcaagggagaagcaggggcttgcattatgacctagttgcagttgaggtctcatcctgtcctgcagggaactctggagagagaatgacctgtagagtcatcccaaattgaggccgggggcctaagtcttggctcccgggtgcgctctgggggggccataaccttggatgagatgcttctccctcgagagcagcggtgaagtatgcacctgcctctgagctcctagagctggggtgtgatgcactggtcctgaaacaaggcctgggcaagtacccagaatttcagttgtcaatggaaagagtcaaactctgtaaaatacttatagggatttattctgagccaaatatgagtgaccatggccagtgacacagccctcaggagatcctgagaacatgtgcctaaggtggtcggggtgcagcttggttttatacatttagggagacatgagacatcaatcaaatacattaagaaatacattggtttggtccagaaaggcgggacaccttgaagtccaggggacttccagcttataggtagatttaaaaatctcctggttgataattggttgagtttctctaaagacctgagatcaatagaaaggaatgtctgggttaagataaaggattgtggagatgcaagttcttatttgtggaggaagccttcaggtagcaggcttcagagagaataacttgtaaaatgtttcttatcagacttcaagtctgtgtggatgttagtgccggagaggtatagcgaagcatatccaacccccacttcccgtcatgcctgaaacagtctctcaggttacattttgaaagagccctggctgcggaggaagtccatttgatggttggggttagaattttatatttggtttacaaagtcttgaattaaaatattttatcattacctagttttatacccgggaatgttagttgttgcacgtgaggacatgaagtgagttaatgcagggcttgggccgtccagtgtcttctttccccacagccttgctggcagtgaccccatataaataggaacaattaccggaagaaactgtgctcctcctaaagcctagctagtgacttccacctttgaaccataggcgaggcagcacttaaccagggcactgtttgataggatgttacaggtggttccagagaaaaacgaaacatgtcatcttgttaagggaggtcttcgtttcggcatctctgtaaaatatttaaagaggtatttttatttctttaaacaggctctgcctcttccgtccccctcgcccaatgtggactctgcccgtccttcctgagcagtgagactctgtccccatgtgcttctggtcacagctgcggtgacatcctgtaacattgtttggtccttgcttaaatcagttactcaccatgttatagccgagttcagacccactacacagacctcctaaggtgctggcctgtctaaaacattatttccattattcattcctgttcactctgggatagggaagccatgctccaagctgtattggaatatcaggtccagggtaattagccagggcctaaagggtctgttttggaaaattcaagtacaagtagaatcttctttagtatcttggatccaccagggaagagatggtctctgaggcctgctatgcagaataaaaccaagagagtcactgtgaaggaatccaagagatgcaagtgctctttgctgtccagtgattaaaatgaaagcaaagacgggaagcgtccttgatccacattttgcctgtgatttgaatatcacatgcttggtccgggcacttaggtgggcttcagtgatttgggccggaaggaaatggtgcccctttcctcgagtttctagattgttttgtcacagacaggggaagccctcatctgacttgccctgtaggaccctagtctgtcgggaggtctctgtccccacccctccctggagtctggggtgtagttgggctgaccctcaaaatatgctgtgtcatcaaaggttcatcatctatctggtctgttttttaacgcaacttgataaaataccagtgttttaataaaaaggtctaaaacatttaccatttaaatgagcctcccttcctgggatgcacacaggagtcttggcgggaggctggtggcgcaggctgatgggtcctgtccctctgtgccttgggcgcctctgcccagcgtcacgcagtgtcatgagacccctcagtgcaagcgcaggtctgcctgaggtcccccctcccacctgcaacctggatgccttttgtgcctatggaacacaactgaaagggccggtcagtgccatggcttggctaattcatggtggacatgcattttggtttttaaaattatggtaaaatatacataaaatttcccaccttcaccatttttaagagtccagctcagcagctgtcagtgcattcacaccgtcgtgcagccatcaccaccacccatcctcagagcccctcatcttcccacagggaaactccatccccattgagcacagactcccccttccccagccctggcacccacccttctactgtctctatgagtctgactacatcacataagtggtacagccattgtcttttgtgactggcttatttcatggagtatcatgtcctcaaggtccatccgtgttgtagcacgtgtcaaaaggtccttccttcctcaggctggatatgggctctttaaaagcctattttcttagagcaaaacccgtttcccccacacctgatcgtcacaagccgtctaagacacgtggtctagggtttgctagtgatcgtctgtgggctttccgagcctgcgctggttttgctgccacaacctgaggtccgcggacgtccctgtgctcgctatgacttctttgtgtgagactgtcagagtgtgttcctggccctgacacgtgctcggcggctggtttttctccttcagatcagcggccttggacagctttcgcttctttggcagccgtttcaagctgctccgtcttgtcattttagagttcaatatctgctgctctgaaggaagaaacggggatgggctggaccattgcacttggtctcttgacctcgatgttgcccatgagcagtgaaggatgacttttgacgagccatgtcagatgtgacaggcaatctagttggcttgagtggaaatgtgctgtacaagtttgaagccttggttgggggcatttttctggtgttcaatgcatttaaattgacaccagacttcagtatgttgttcatttcaggcccagcactgtaggctcccatctttaaaatgtgtgggtgccgagcgctccctcgtcagcttttgcaaagcattttgcatattcccagtactgtatttacattcctggctcacattggtttttgttttttgtttttcctatcttaaagcttatttttgaagtgaatttttaatgctttcagttgagtagggatttgtggaattttgaggggtggggaggtgcagtggagaaaagggggaaaatggttgtttcttggctctcagcataagctacattttccatcatatggagtgagatgcctatattgggcagctgtgattttaagtgaaagtcatttccagttgtttctaatgtctagaaattaggtttgttttgattttaattgtcaaaggaagggactgtgggtgaggaagagcccttgccgccgcctcccctgacgtgcccctgcttgggcagacgcctccctggtgaggtgtgggctgcgctggacagcacccaggaccacggcctcgttcttttccttctcactgtgttttcctcttgggtaggggtgagggtggttattttactcagatctctgagccttaaagtggatcttctgcagatcatctccagagtcatctgacggcgccgggcagaagtctgtatgttgggagctgtccccagctcctctccttaggacttctgaatctgcttcaaccaagcatattcctgcctcatccggaacattcctcaccctctgccccagtgcaggcggtgtccacatctcagggatgcagcgtggtggaatttttaaggttttggttggcgtggatgagagcatctctgctgaggctgccgtgcgggtgtgggctgggtgcatctgtgtctctgggcaccatataccaagtggcactcatccctgtgagaacatggcctgggcattagaggataggatccttagtgtgagggaggcctcaaccataaagggactgaggggagagacaggaagggtccaggtataagaagagctgcccacggcagggggtgtggcagtgggaccaggatgaatgggtctcagtaatgtggctccttccccaagctggggagcaagggaggcttctgctgttgggtgttgaagaggaatctttggtttgcagatgggggtggggtgggtctttgcccatcctctgatcgtatgtgtagaagtttgcaacatgaagggcagactgtggtggagttctttggcagttaggaaagcaagccagggcacagacgtgttctctgaaaggcagggtgtgggcaccacagggtcagccctgcaaacaagagcactgagcagagggagcggcgattggattggagaacggaggctcccacctggctcacatactcctacatacatgccacacgcatgccacggtgcttaggaatcttgaaagctgcaggctcaggggagctgcgatgctcatcgtgaagatgcagagccggagaggccgcccaggcaggaaggccagtgctggtcgcctccaggtggtctcaggatcccagagcaggaggcagccatgtggtgctgaaggggaagcgagggcatagaagctgtgccctggagctggaatggtagacagggctttcttagtgccagggcctgcaaattcccaacaagggctcactggaatcctcctcccgccatcctcccaggccccccattggccggccaggcccctggattacctctctggtgccctgtcctcctccatgctctcctctaagggccctcactggcacctttgccctccttaaccaggtaacactaaaccaggagacatctagaatcctgtttgagacatcttcgagagtcaccttgttaactagacagaagtggatctctacaggttagagcctggggaacctctgttttctttgtgatattctctagtgagtgttccaggaaagaacatgccccactgtctcctttctacttgcagatagcggtgaggtgggagaggggcctgggagtgtgctcttcattctccacctcctcccccgaggaggtggtcatggtcactcgcttgacgagcccagactctgagcttctgcccctttattgagcaaattcataaagtcaaccatgctcttttattatgtaacttgttttttagattcaggggtacatgtgcatgtttgttgtataggtaacttgcctatcacaggggttttgtgtgtggattatttcttcatccacatgataagcacatgataagcatagtacccaataggtaggtcttcaatcctcaccctcctcccaccctcaagtaggcaccgttgtctgctgttcccttctttgtggccatgtgtactcagtggttagcacccacctctaagtgagaacacatccatgttgctgcaaaggacaacatggatgcaaatgatctcattcttttattatggctgcatagtattctgtggtgtatatttaccacatgttctttatccagtctcctattgatgggcctttaggtttagtccatgtctttactattatgaatagtgctgcagtgaatatacgcgtgcatgtatctttatggtagaaccgtttatattcctttgggtgtgtgcccaataataggattgtggattgaacagtaattgtgttttaagttctttgagaagtcaccaaactgctttccacagtggctgaactaatttacattcccaccaagagcgtataagcattccgttttctctacagcctcaccggcatctgttattttttgactttttaataaaaaccattctgactagtgtgagatggtgtctcactgtggttttgatttgcatttctctaatgattagtgatgttgagcatttttttcatatgcttgttggccatatgtatgtcttcttttgaaaagtgtttgttcatgtcctttgcccactttttttttacagagttgattgttttttgcttgttaatttgtttaagttctttatggtttctgggtattagacctttgggggatgcatagtctgcaaagtgtgcttcttatgcaagcacccagccttccggcactgggacgggccacatgggaggagccaaaggatgggagagtttaccccctccagcccatgaacttgctgtgaggacccctcctgccatataccctcctgggtgtgaagaggcctcctgtgtgggctgcaccactgtctccgggattcttggcctggaggcatctctgaaatttctcagaatgcccaatttgcaccagagatagagccaggccccttgggatggaaaaggaaaagaaactagatttactttttaaagtttctagaacttctttggtatccctagaaaactttttttaaaaaggattttctttttaagttggatttctatccattatttacctgagacataatttcagctgatcaaagtttagagtgctggcaagtgccaagccttacgatagatgttgtaccttttgacaaatgaccatgtatgcacagctctgtttctggactctgttctatccatttttctgcttgtcctcatgccaacatggccccgacttcattgctgtggctctgtagtaagtcttggtgtcttgtagaagttctccaaatttcgttgttttttccacaattgttttggctcttcttagtcctttgcatttccatgtagaataagtggattaattagtatagaaaaacctgtgattttcattcaactgcattcaatctatagatctatttgcagagatatttcacagttttgagtcttgatctttgattgtggcgtatagctccatatttgttttctttgatacatctcaacatggttttgtaattttttggtatacaaatcttttaaatatattccacataaatttatccataagtttttcatgtgtttttgttttgtcctttaaaaatgctatatttttagtttcaattcccagtatttctttgctaatgatgagaattacaggagctttctgtaaatttgtctagtatgctgtgagtttgctgaacaaatttattctagttctagttgcccaaggattctttagtatcttccatgtacgtgaatatcttgtttgagaatgaagacagttttgtttcttcctttatactatgtatgctgttagtttctttttcttactttattgtactggctagggtctccatactgcattcaacaggagttggggaagtaaacatcctctgttcctaatcttaggggtgaagcactcagtattttactgttaaatataaatacacattcttgtaaattcccattgaagttctattcttgtaggctgagagttttattacggaagggtgtgtcattttgtcaggtgcctttttgcatctgttgtaatgtttatgtggtttctgtcttttattctgatcatatggagaaatgcagtaattgattttctaatgctcaacaaaccttgcttgtctttgataagtgccacttgctttgagaaatgcatgcatacatctctctgtatatatatgtgtataattccagcattatttctatatacatagaaataataaatatacaaataatgctggttatatttgctaatattttacgaattacgggatactggtctgcagttttcacattttgtcttttttaggctttattatcggggtaatgctggcttcataaaatgaactgatgtattctctcttgtactgctttttaaaattgtttaggattggtattttttttatttaagtgtttaaaaacatctgggcctggaattttctttgtgggaaggttattacttaatttaaaaaatatatgcaatactattaagattttgaatttcttcatgactcagttttggttatctgtctttcaaagagtttgttttatctaagtggttgagtttattggcattaattgttcgtaatcttctcttatccagttatccctctcaggtctctagggcacgccatgatgatgctattccactgcccttttttccattcctggaatggtacttcccaccttctaaatcagtcttgttacaggtttattcattttctcagttctgtattttattgatttttatttttttgttattttgtgtattttactctctttctactttctaagatagaagcagtgggtcccactgaagaaaagcagatagcaggcactaaatttccctgtagggttaactatgtcagcctgacagaccccaggctgtgtgtctttggaggacagagacattggaggccgttcatgatcctttctaagattggtcattgataggaaactttgtttgttaagtaatataagtattcaaaactagacattaacttctaagcagtgcttaagcagcattctacatgttttgatagggattgttttttaatatcactctgttaaatatttatgtactgtaattattgtaaatggtgattacactgttccatgtgcatttgcgagaatataccctgccattgtgtgcagtcttctataaatgtacgttgggtcaggttgttttggcgtgttgtgcaggtcttccctatcttctgactttgtctccctgttcaatcagtcgagaaaggagtgtcgaagtctgcaactcgaattatggatttgtctcttttcccctttggttctgtcaactcttgccttgtgccttctgtacatttgctagtaggtgcctaatcacatgagatcatgacgtcctcctgatgtgctggctccttaacagtatgaaatgtactctttatctccagccatttttcttactctgaagttactttgatattaatattgctagctttcttgtgatttgcctatgcatgtgttatactcttttccatccttttgcttttgatctatttctttatatttatagtgtgtttcttggaaccaggatatagtgatccagtatgcaagtctgtactttttatttgaaatgttttagttaatgtactcatcaataggtatgggtttagtctgccgttttgctgattttttcatttgtactttttattcttcattcctgttttcctaattccctgccttcttttggattgaatccttttttgatttcattttataattactattgcgttattagtgctacctttttttaagtagtttgtttagtacagtactttttgttagaaattccagaaatgatggaatgcgctgtatccacactgtccagtatggcaggcactggccacctgtagctgttgagcacttgacatgtgactcgggcaactgaaggaactgggtatgcaattacgtttaattttaaataatttaaatataaatagccacttggggatacctgctaccacactgggcagggtgactgtagggtttctaatattattgttaacttctcatgatctacattgaaaatggtgttctgtgacgtcacatgcaatgcaagaccttcaccacagtgaacttccatttgccccttgaagtcccatgtacacggccattgatcttacttctacatgttatagactctcaaatacatggttgtgactttttcctttaaacagtcatttgtcgagaaataatcatttagaattgaaattgaaagtgagaaagtactcttttcacgtacgcattttgatgttctaaatatgttgaaagggcgcaggggggtttaatgcccttcatcagatctgtgctaccttgtggacagtaattggaaaggatggggaacagggacgcacgagtgggtagatgaatgcgaggctgttgaaatggttccatggtgagcagtgcatggttgcttggaacaggaaggagcggaggtgttaagaagtggttgaatttgggatctctttggaagtatgatgctccagctgttatcagcagagctgtaagtgaaatgtactttgattgtttgttgaacatccttgccacctttcctatcgaatttgcttttcaaaaatagtgtggacattaaaaagccatccccatgtgcctaatttcaattagaaaatgttgaatcactgtgaatttggtgagtcatcctgcatgtaagtagagctatccatctaactcttagaatttgttaactattaagagaggaagacagaaggtaatatagagatgactatttatgagtcattttatttattcattatccatctaaagagtagcaattgattgtatcacagaacggtgtttgttttacatcttttgattaggagcagtggtttatggcatagacttgcttaatttcctcctgtttcttcctctggagtggataactgtttcacaacagaaggcgataaaagatttctggtttattcattaattttgctttgagacggaatacctgatctcaaggataagatgctgattggtatgacctgaatcgaatgattagcagtatgttgcccttactctgatctccccacagtgtgagagattttctcatcttcgcatcagtttttagccatgttttggtgtttaagcagagatacgattccactttgaaagctctggaagtaattctcagatcacatatattcatctcaaatttgaaatctggagtgtttgtcttgaaattaaattgtggtattgtaagctgtcagtggcatgatctgtgctggaacctgatgcggtctagtttacacggtattgaatcatgtaagtatctcatctttcctctttgaattcagtatgacttcacataggtgaggttagcttttaagtgtacacagaggtatggttaactatcagcagacttcagttatcaattgctgatctcagaaagctaatttatctttagtgtccaataacattacatggctttctttctttgttttatgttttgtgtatatgtgcttaactgtttaaataagttctggattgcatccaaataaggtttgatatgctctcattaagaatatgatattgtgaataaatgtaatcctgactttcaataaatggcctgtaaaaaaaaaaagaaagtatttagagttagtgagttgaggggcttcgtcacatggctaaaggagatttgagtagcccctggaatgttgagtgactctgacttgtggaatgcatggagccccgtttcgttggctggcaggatctacgtgggccgagcatacagccctagatgaatgacttatgtctctgaattctgttcctaatctctgctgctcaatctgtggccacctgcagaggagccagccggatggcatcgtccttaccgagctctctggttgtcagatccttcactactccttagtggctgattactctgcgtagtgtagggtgctgtagggtgcataactgattagtgccttgcagatataagcaaagtttacaatgaagcccttgcgcttaggagcatacagtctagttatgaagagaagacacaaaacacccagtcacatcactgtgaacagacaagtttgccaggagtctgttcagacctggtgctccctgagccgcgctgagcagcagttcagcggggataccaagttggggaagatgccaagtggtaggaaggaggctggggctctggtctgcacatgccagctgatggagtttggagttggggggatatggccagttcccaatgcactggaccagccaccatccagaattaggaagtagatcagcccgtgcctggcatgcattgctttcttttcagtttctaacatatatataacctttttaagtatatatatatgtatgtatatatataactttagttatagagtctcgctgttttgcccaggatggagtacagtggtgcaatcatagcttgctgtagcctcaagtgatccctcccacctcagcctcccaagtagctgggactacatacgtgcaccaccacgcctggctaatttttttgaaaggacaagtcttgctatgttgcccagactagtcaccaactcctggtctcaagcagtcttcctgccttggcctccaaaggagttaggattacaggcataagccactgtgcccagcctaatctatataacctttcaaacaggtatctccatttgtatactaggggagaatgtagaccccacaccctcttcctcaagaaacaacttgaacgcatgccattctgccatctcagccaaggcgattgcctgtgcccttcccaagggcttggagacaccctctccctgctagccccgtgcaggggtcttcccatgtgtaccctgcagcaccgtccacctgtctgagttcgatggggcctccaggccccctgccttggtgaggcaacacgctcagcgcctgcgcgaatcttcttgcccatcagttccttttccttttatccaggatttcacacactgggacattttgtgccaacaattattaatcagttttaagattgactgggtttgtggactgtgcccagggtttgtgcacctcactcacggcagatttcctggcagccctggggatggtcctgctcccccggggacagtttccatctcatggtgtagctttgggagtggggcccactgaagaaaagcagatagcaggcactgaagttcctgcagcctgttggaccccgggccgtgtgtctttggaggacagagacattggcctacagtaaaataaagtcagatgagaaagggtggggaggctttcctgctgtaaagggattatgtattcatactcgaaatagggatacattaggggaatagattgtaatctctacatccccaatccatgaaaacaaaacagaaatggagggccaagaaacctacacagggaagacacgaaatagcaaacatacctgatttatccaagggaaggcagaggagggaaacgaaaggatgaataacaggtgaggcaagcaggacataactcgtaggatggtcagcatgcccagtgcggcggcgaggacttcggaagtcagtggacccagtggagactcagatgaaaatcagagatggtctcactgtgggaacatggtgtgcaaccatagactaaggcggcacaccttaaacatagcctaagagatgcaccgtgcagggcaggcacccacatgaagcggctatgtaaacgtgacaaagtagatattaagaaaagtaggaaggaacagtaaaaataagatcagatatcagcaaagcagaaaatggtattacagagatgttaacaaaggcagaaattatgtccttggaaagagtcgtaaaaattttcaaaattcccagccaaacctgatgaagaaaaatgaaatgacaaataatataaatgaaaaggaaagatcactacagaatctacaaatattcaaagataatgaggatgttatttaaaactttatgttgacaaatttgacagtttagatacaatgagctaagtttttgtcagagcttaacaatttaatctaaagaaatcaaaaattgaaaattaaaaatcttccctcaaagaaaaatctaggcccatacagcttcactgttcagttttatcaaatagttaaggaagaagtaattccaatcttatattagccctttcaaggaatagcagaagagagaataattcctagcttgtttcataagaccaacacaaccatgacaccaagatgccaagatgtgtcaaggatgtttgagaaatggtaaccacagaccaatgtctctcatgaacccaaattttaaaatcctaataaaatattagaatgtcaattttacaatatagaaaaatatgtatatttccagtggggtttattccattcaaaaatcaatcggtgtaattctccacattcacagaggaaaagaaaagaactttatgatgataatgatcatagtaaccaaaaaaagcatttgacaaatttcaacatccattcacgatgaaaatgcactgcaaagtaagaatataaaggaaattctcttacatgacagcgtgtatacgagtgtgcacacgtgtgtgtgcgtgtgtgtgcatgcatgtatgtgtgtgtacacgtgtgcacctgtggttttctctccatgtttcttccagtactgatcagggttgcttgttttcaggagttttcaagtgctctaccttcaagttttccccagctaaatctttcccatttctttctctaaatccctttttgatatttgcagttcttttcaacttaccaccaatattttagtcttgattagaatcttcccagaaaagacaagttttccttctgattcccacatgtcccttcagctcgtgatggcgcagaatatgtttgcttgccagttaggggaacctgaggctgccttcctgggcagagtggcgatttgtactgggccaacggggcagccactgttacttatggacaggtggactaggctctttttcatcctgaggaactgctccgcgcttgggaagagccactggagtttatcagcctgcgtgtaagcatgtgggaagggggatcaggaacatttagtagaatagtccgtgctccaggtgatcagtccccacccacccgcatgcctctccttctccatcccacccgcattttgggtcattgggggattaatttattcgtgtctcgtaagcactggcagaacaccacccgtgtgaacagcattggtgaagcctggggagttctttttgagacttccttgagcttccggcagcacgtgtgagtttcgggggtgattggaatgtttctccctggagggaggcctgatgccctggagctggctccagcccgagccccgcggcatgttctgcctgctgccgcctacctgcagggagacgcctgagctgggaaggttctgagggttggcagggtgctctgctgtgctctttgggaggatccccttggctgttctgcatgcccagggccgtgctctccgtggaaatctatgttggagacgacaggctccggttccagctacaccagcctgacttccactggacagtgccattttctgcctctgataacaccgtggtgaagcgccttacgtaaagcaacagattttttgttttaagatgcactataattactcttttcagaaccaataatattaacccagtgaagtcaaaactgaattgttttataaactgactatggagctggtgtaaggagatgcagggaaggcttctcatctgagtcggtagcagagtacatagtgcaagaagcgtgggcaggctcccagcgcacccagagatcaaggagagtgatgggtgctgcccgcctctgaggggacggaggcagctgccacccgccgtgtccctcacgctggctttcagaaggcttcacgcaagtgggctcacaggcaagaagaaaagctgtgggccgtgtgtctcccttggctatggctcagttttaatgtaattagaagctcaacttgaaagtgagatatcaaaggaagccttcagttgctgaagatgggtgtgctgggggatgagggcgtgggttgaaaagtatccagttactgtttttctcacgtggatcagtctaacatatgtgactctggtaattgaagatggtgacaggctaaactaagctgggattccccagggagagactaggatttctggaaccagtctaacaaaaacagaaacttgaaggagaaaacagaatatgcctccctctcttccctgcttccctcctctactcaaaaaaaagaaagaaagaaaaaagcagcttttgcaatgaagaattcagtttttcgcccccgagtgtatgatggtagtgactttggtgttcctggtgcagacctgtatttttttgtgatgtcttcatctggcccctcgccctccactcttcatgatgaatatgagacctgtgcactgagggtcctcaccaacacttccttcctcacagccgtatgatttcatccggaagcggcctctaaaaataaacaccctcatgttagcctttttccaccatgcttcatatttggctcttgtataaatatctgccacgtttccactgggaattattgctgttatatattttatagacactcgactgtcatctaagtggcttattttattcccatagctagaagaaaaatacaaaaataattttgtaatgtgagtgtgattgtgggccaggagttatgttctgagaaggagctgagagtaaattatattcctgctttattgtgttgatattgtcttccctgttgtgtcctgagttagcctttgttgttccaagttattaaccagaggtggcttgataatgacgccactttggaagcgtctggctggtgtttaaaactctagctggtgataaatatattttagtcctattaatgaagaattgtaacattttagtcctattaatgaagaattttaacatccatgcagatgagcggcatcctaaaagcagcttcagatgctttggggtgttttctaccgaagatgcttttgtagaaataccgccttccttttcattttttacactggtctgttcatcaaaaaccataacttcatggaacttgcttctgtggaatgaactaaatgtaaattatttttccaaaagctttatgagtttatcatacatgttttggaaaaagtggaaaaacactaggaagaagttccagtgagcaaatgtttcccgacatgtttcacgttttgctctggtttgaagcagggcgttttgtggaaggtagggctggtggatcgctcggtcgctgggcagtgctggtcactgcctttctttggttgagctggtcttgagtcctggtacctgtgtctgccctggcattgaccccgtggtgctttctgtgcatctccgtgctcacctttctggaacacagcccctgaacagaatcatttggcaaaacatcccagtacaaaaaccagtgggttttacatggggaaagaactcaatgagtccacagttcgtgtcgatgaaggaggcactgcgtgttgggctcaaacgcatctgtaactgtgggtgccaagagacaagtagagctcagactgctgggagcgttggctggaataaagctggccctcacggggctgttaaaatacttgaacttgaattcaaagtcagatttaagctgacttcacccctcttcccttgcttctgaagattctggtttttcacgagacagaaaaaagggtggaaccaggagcttatccccttccttccttccttgcaagcagcagcaacagccattgaaactcaaagacagcaagagctctcttcccgcccactcccagcgccactcccgggggaacccatgtgggaagggctcttcctgacacctctcctgcagcacacagcacacgtcagccttgccctgcatgcagccttcccagctggagcaggtcccaccagcgccctgccaggcggcaatggtctacaccgccattttaccttccccaggtctgtggcattaggtcttcccttgtgagtggctcgtattcttttcaagatactgtaaataatttggcatcatatggaccacttgatgcttctatatgaaacatgccttataaacccttagtactgcatgatttcagattacggaaatatctgcatgagtattggctgcgatatctctgtactagaaatttcagtgctacctctacacaaacagacacactggggatgtgctgtgtgtattgtatgagtgtatcatagaatatttcattgtccgtggtagtacatttcacatcataggctgtctgtggctacttttaaaccttagacatttgaattttccctcaagctttattctggtgaagcgtgggatggggtcttagctcactttggaaggatggaacagttaagcagcgtacctggtgactggcactgtgtgtgagtgatgccacctcggcaccttcgcgttgatcatctttaggatctttaggatcactgagaattaatcattctttgcatgcataaacctgtgtaagggttgctccacgtttctgccattgctcacagataaaacacattcatgatctcagcttaatcccaagaggatgtttccccatccatcaaaaccacagtgcaggttttcactgatgggacatagggaaggtatggcaagctgggtggaggtgtgtttcctggacttttccggaataacccaacccatccctcctagtgagcacagaattacccagaaagttgaaaaggaaaacacagtttattggaacaaatatgcaaagtgatttgttcttttcacagagaaggtaaatagcatgtcagccgccaaggccctcacacacacggatctgcccgtggagtgatgaacttgtaaaagaacgtcaggtggaagcggtgagagggcctggacagttgttctgcagctgtgttctttgtctggttaatcgcgtgcgtctccagtctgtggctggccagccgcgtccacctgcgtgctccgggcacccaaggtgcttggttaatatgcagctctctcaacatctcccccttaggagcaacaggtacccggtgctggtgttgtccgtccagatgaaagggcctggccactctgattgcacttctctttgatctccctgtagaaggtcggcttgtctgcctagagattcctctgaagggcaatttaaaagttggatttgagcaacatcaagtgaaatgtcttcccatctcacgccgtgaggagctctttggtgtggctcatggctggatgtgaggaaagatattaacccttcctttgaaacaaactgtctcacaggctgaacttgccagctacctttctcctctgcttttagaaaagaaaatattttctttctcataatgctcttggcccttgaagataaactcattgcagtgtttaaaatttgtcctgagaccctattgcctttactttgttagtgtgtgtgagactgaaggcctgtggatgggtgagatgcttcgaactgatagaaaaagaaaacagaaggaagatttttgtgggcagagccgagacgccgtctctcaaggtgttgtgatcagtaaaagaatccatttttaatggtgaactggcaaaggctgctaaataccaattactgagtaaagtgccatgagaaggtaaagccactttttgtgaattatttcattgcactaacgtgctcctactgaaaaacatggccaggctgcttccgatacagttcacttaaagaaaaatggctcacgttaaaaatagttgctttattttgtaaatgttttagaaaagtgcattgctgtccagaaatctagatgtacacttgttttgtgtttaatgaaaaagggaaggaaaaatatctcgaaatcccaaatctcatcggtatcaataggatcataaaagtaaaggcaggaaaaggaatttgctgctcgtgtttcccatccatgtttccaggttatgtattttgtttctcaacttttatttatgttaatgaaaccagtctgctttttttttttgttatttttgatgactaagatcccatttattaggaatttgtaactcagctgtgacaacgtagcctgagatttacacagtccccgttaagggtagaaaatagagggagggcttagctctctgttttcatagctgtgttaaagagccaaatagtaatttgttgaccgaatgtattatctgtcctgccatatgttgttcaaatgatgagacagaagaatgaaggactcttacaatgtaaacttctggaaatcatactgtttcagggttgtttacattaataacaatgatggcttacatgtatgtatggttttataattttttgagattataaaaggtatacatggtcagtgttgaaaataaagtataaagaaattaaaaatttggacggtgtggtggctcacgccggtaatcccaacactttggtaggccaaggtgggcagatcgcttgagtgcaggagttcaggaccagcctgggcaacaaggcaaaaccccgtctccaccaaaaatacaaaaaattagctgggtgagatggtgtgcacctgtggtcccagctgctcaggaggctgaggtaggaaaatctcttgagcctgggagttggaggctgcaatgagctgagatcacagcactgtaccccagcctggatgacagagtgagaccctgtctcaatttaataaataaataaaataaaaaatgtatatttctattgcataattaactattatttatgttttatcagtccttctaatttctttttttcttaggagacaggggctccctatgttgcccaggttggtcttgaactcctgggctgtagcagtcctcccaccttggcctcctgaagtgctgggattgcaggcgtaagccaccgcgcccagctttctagtttgtttttatgcctacagcgtacaaatgttactaaagtttggattgcgtcacactgcatgtgttgtagtgggatatgcctttttatgcaccagcgtatgcattgtgccacatccttagacatgacttttattggatatgcagtagcctggcttacggatgtttcataatttatttaacaccctgtgattggttatttagcttactttcatttttaactgtaccaaattgtgctgtcatgccatcctggaagtggattgcatgtgggcgccttgtacttgatagagcactttcttaaactgtatctcagtcattagcacaagtgctccatgaggcagtgaggccactgagtagtgatccgggtcacaagggaagaactggggcccagcgagactgaagcgggtattttcacgtgagacttcgccagtacggggcaaaagcacacggtagaggattttgaaatcaccctgattgaagaccaagctggtttttgtcccaacaatagtgattccttcatttatcccacaaatatttaaatgctgcgtacgtgtcaggcactgtccttggttctggtgaatagagcagaccctgcctgctgctccgggggatgtcggcccgattctttggtaactctggaaggcttgtgcacctgctggagtttgggggagagagggagggttgtggacccagtcacataccacagtgggttcaaagtctcatctttattctgggagtgactgggtgtctttaaaagtcaagttcggaagattctcatttaatgatatttgattccatgtctcatgcagaggaatacttagatacgacggaatgagttaagtaaagggtaaagtattacttaaatatatcatctgaaaataactgcttcatatctcttgtatcttaaaatattttctggacaaaaattttatgtaaattaaaacaaaatgctgtttttcatcattgtattaggaaaaaatgtaaatacaaaatatttggtgttttgaaggatgggccggaaatggggatgtttttgtatgatgctgctgataacagtaagttgctatcagtcttgtgaccatatacatacagacataaaaatgttaaaacccttctcagtactcccactttgaaaaagtatactctagaaaaatatctaaattatagaaaaaacgttataccttgcagcttctcttatcatggtggaaaggaaaccaacctagacgtccaacactagtgagatcgtttagataatactgacacatgctctcaccaaaccgagtcagcatctaatgcctatgagactgcgtagtcagggataaatgcttccgttaagtgaaaaagcagagtgctaaagagcaggcacattagagttacaactgtgccatgtgagaaaaagcttgaagtgaatactctcaaatgatgataatggctgttttagggatgaagatcaaggaatttcctgttttttcttgtctgtatttcaaattttttatagtatagttatattactttttaaaactagcgacttcattttataaaatgacttttacttatttttaaaatttaagcaatacaggaaagcaaaagaaataacaattacctcccatctcacagcccccagataagtagtgctgatacttggtgagcctccttgtaaaagtcactctttgcttgcataaacatgtggttatatgcataaaagacagtaacataaacacagataaaacgacaaatattttcaaatgacaatagttttgtttaatacaaggttcttaaatattgtctgtaaagaaccagatagtaaatatattagtctctgtctcagttattctgccgttttgtgacagcaatcatagacaaaatgtaaatgaattaatgcagccgtgttccaataaagttttattgctcttcattctgtttagatccatttccacctggcatcattttcttcttcctgacagtttccttcaccctttctcattgcactggtctactgcaggtgacttcttacagttttttagtgcccaaaatgtctttattgcttcttgattgttgaaaggtattttcactgggtgtagaattctagattgacagggtttttttcctcccaatactttacagattttgctacactgccctcttgcatgcattgtttccattaagaattctgctgtcatcctcatctttttgtgcctctgtgtgacatgattttttcctctggtaggttgtaaggccccttatcaattttttgaacaattttattgtgatgcatcttggtgcagttcttcatgtgtcttttacttggtttcactgtccatcttgtatctgtgcatttgcagtttgcatcaaattggaaaatattttggctatttcttcaaatatatttttttccttttcctttcagaaactccaactacagatatgtacgatttcctgaagtttttcaaaacctcactgataatccttccttcctttcttccttccttttgatttcctttctctgtcctcattttgtgtagtttctataggaatatattcaagttcactaattttttcttttgcagtgtctaatctattattttcatttgatgtatttttccattgtaggtttttttagtttttaattctgaaagttctctttggatcttttttttactatattctataattctaattaactttttgaatgtctggaatacagttacattaactttttgcatcctcgtctgctaatcttaacatctgagttagttttaggtccatttcaattgactggtgtatttcttcgtaatggatcatattttcctgcttctttgtgtgcctggtaatctttgattgcatgtccagtattgtgaattttaccttgttgagttctggttatttctgcattctgatagatttccttgagctttgttctgggatacagtcacagttaaattacttgggaatagtttgactcttttgggtcttgcttttaagattcgttaggtagaaccagagcagtgtactgaggccagcccccttttcagctcgccccggatggtctgtgaataggaggcattccagtgtggctgtcaggaaaagtcatgctcccagccctgcaagagcagcggttaccaccctgtcatcctcacagatagctcttttcctgcctgggggagcttcctgacatggcggtgcccatcagtactctgatgaatatgtgagggtgacctgttgcagatctcaggattcctctttctgagatgtgtctctgtccctccagttctgtcctgcaaactctgcctgtcctggtttccgggctcacagctccatcccctcagtttgggagctggccaggcccttcctgtgtgcccctccgggtgcccggaactctcagggcagtcgcagccttttcttccttggttttctgtcactcatctgtctctgtactttgctctccagtttcttgaaaagtgtgttctatttaatttattttttctttttggttctttttggtgagagggtcaatcttgtctcttacttattttatcttgcctggaaacagaagtgctggggtgttttttaaaaaataattgtaagatacataatttaaagctgtgctattatagtatttacatgaagttttaaaaagaaatttgcttcccctaaactttctgatcatcgatagcactttttgaggcagggagccactagtggtcacctatgtctgttagcaatagacagacatgtctgttacttccaaaggactctcacagtgtaaactgaggaccctcttacaagctggtacgggaagaccaggcctgcatctgtcagagatgagaataagacagattctcctaatcaagctgcaaggagctcctgctgtaatcactccagaatatatatcaagagtggatgtgtgttctctatggcaaaaaacaggcactggaaaatttacatatttttagtttaaaatatgcatgctcttggccaatatgtttgaactgaaaaaagatagaatgtggttttctgagttatcttctttttcttttttctcaagttagttaagatttataaggtgcttactcagaaattcatggatgaagtacaacgttcaccttcacaacactttgctctggttacaaatttttgtggtgtagaaacccccaaagtgcctcgtattttctcacccgagtccagccggagatactgaccttggtctagatcgtcacctctgaaccattcctgaagaagtgggtagacaccccctcaggactgctgtaagagtggaacacattcacgtataaccagcacagaggttagtattcagtaagcactcaataaatgttggctctgaagagattcttctcatttgcatcattgaaaaggggtctttgcaatgatgcttatagcccagtttggggtgaatcatacctctaagcaactgtcattgaaagaaggccttaatgctgatagtcattgtttcagttttactttttatttctttgtcttggctctctggctaggcctttaatacagttttgaatagaagtcgtgataatgggcattcttgtcttgttactaaatttagaggaaaagctttcagcattccactgttgatttcctgtgaactctatagattgttttgtggatacccattttcccccagaatgaaagatctttttgaaattatattattctttctttaatgaggccattttcatatttgcatttatgagaaaatgtttaaaaaagtatgtgaacataaattatataatcttttgagtcaatcagaattatacaattgaaaaatagtctacaattaatgatattcaagtatctttagattttaaactcattaaatgaacattgaaagttctgttttctaattatagagccgagtttaaattgacaagagcagccacactcgagttgtctaagtcagaggctttataaacctgttggattttccaagggttgcttctcttgaataaaggtgtttttgtttctcacatattttacattttcaatgacctgtttaggcagaagcaccttttgtcactaattagtgtggtgtgacaagtaacataatgcgtatctgaaaagctccactgggtgtaagtggagttcacacctcttaatgagtgccttcaagagtgtttttgtcattcccagggagaactagtgccccttgaatagaaaactgctgtaaatggaaaaaggatgtgtcttaggagcctggtgtaagtgcagatgggcccaccctgtcctctgactttagggccttcctcaaagccaaggccctcttgtgcgatggggctcttctccttcttagaattcctacatccagagtaatggagacgacttgggatcatgcttcaggatatatgtaggtgctcaacacaggctggtttctgtttttaatttctggcagaatgaaccacttgaaaatgaattttcattacgattttaggagggctgagagtagatgaggtaagagatctgcctagggggcaggatcgaaggaggctgtcactctcagatttgtgcaagtgacttgtgttccccaaattcacatgttggagccctagccctcagtacgtcggagcgtgactgtatttggagatggggcctttaagcaggtacttaaagttaaattggggttgttagaataggccctaattcagcctgactagtgtccttataagaagaggagattagggcacagatataccataggcttctgtgcacagagatgaccatgtgaagtggcagcaaggggtggccgtccgcaagccaagaagagaggcgtcagagaaaatcaactctgccaacaccttgaacctagacttgcagcatccagagctgtgagaaaataaatgtctgttctttaaaccacccggtctatggtattttgttatggcagcctgagcaaattcattcagcaagtgccagccttgcactcgcgggagagtgagtgcctcctgcagtgctcagtctggtctcaggctgaaattctaggtagatgcacattttcccagttggcaggtgctggctcatgctgaaggggaacatatgctcaggattcctgctttatgtacttcaaaaggagacatgtgacatgtttcacttaacttcatctaaatttcctagacacaccaatctgtaacggtttagaactcaacccggtggttatacagctttcctgaagtggagaggtgggctacttatcttgtatgagtcccatgagaactaaagaacaatggttcaaaaaacagatggatgtctcccatcttacattccctccaggaagaagtagttgaagaaataatggatataaatttccttgaattaagaacacatgaaagacttaagaataagaagtccaagagaggaccaaagaggcaaaaaaaaaaaaaaaagaaaaaaaaaagaaaaataactgacgtctatctagaagagcacagtgaaatttaagaatagagagaaaaatctaaaacattagcaagaacaaacaacacatataaagaaccagtggtcatattggcttcagatttgtcaacagcaatattgaatgtaagaagagaatggaggcatgttttcagcgtattaaaggaaaataacttagaacagagttttatatgcagctaaaactttaaaatatgagggcttggcaaaactattctcacaaggcctcaaaagttacaccttaacaattataataaatgtaaatgaactaaactcaccagtaagaaaaagactgaaaaatggaataaaatataaaatccaaatatacgccactcaaaggttatccaaagtataaggactttcaaactttgagggtaaatggatggaaagaagcatgtcaggaaaatacccaaagaaaactggcatagctataatgatatgtaaaatagattctaagactaacagccttgttagagatagaaaaggtgaatacacaataacaaaacaagtaaaatagattaacagagtaaaacataaatgacaaaaataatttgtattcttgaaaatatatagccatggaagtatacattttaagttagaaaatgaacagaataaaccttttaaaaagcagaagaaaagatcattggaaattagtggaaaaaatacaaagatcttaaaaaaccatgaattgtttgtttaagagaaaaaaatagattaaaggtaagatatctgaaatggctatattagcattagatgatgtatattctacaaaaaaagttactagggttaaagagagatgttacatagcgataaagtattcagttcaccaaaaagacctaacagtcttaaatggctatgtacctgacaacagaattccaaaatacatgaagcaaaaacggaaaggagaaatagataagtccacaattataaatggagatttcaccatttcttactgatcaacagatcctaaaatcagtaaggatatagacaatttgaacagcattatctactaacttgatgtaattaacatttctggaatacacttaacaaaggccaagatgtggaaaatccagaatatttgaaagttcttagtaacccatcattcaaagaagtcacagggaaacttagaaaatgttttgaattaaatgaacatgaaagcacaacctatcaaaagctgtgggttgcggctaaaagtgtgctttgagggaaatttataacattaagtttttataatagcaaaaggtctcaaaacaatgatctaagctgctgctttaagaaaacagaaaagtaagagcaagtcaaacccaagacaaacagaaggaaggagataataaagataaaaacaaagatgaataaacatggaaaacagaaaaacagtggaaaatatcaatgagtcaaagaactggttctttggaaaaatattaattaaactgataaatcggtggctagactgaccaaaaaaaaaaaaaaagagagtgaagtcatatattaacaatgttatgatgagaggggccattgctacaaaacatactgacactgaaaaaaaaagtgcatagcaggacagtttcgctacccatatgtttgactgcttagataaatgaataactttttttttttttttttggagacagagtctagctctttctcccagcctggagttcagaggcacgatcttggctcactgcatccttctcctcccgggttcaagtgattcttctgcctcagcctcctgagtagctgggactacaggtgagcaccaccatgcccacctaatttttgtatttttagtagagacaggattttaccatattggccaggctggtctcaaactcctggcctcatcatccacccacctcggcctcccaaaatgctgagattataggcgtgagccactgtgcccagcctgaataacttttttgaaaggcacagactaccaagctcattcaagaagaaatagtcttaaatctatcataataattgaatttataatttaagcctttccataatgaaaatttcagacgtagttgtcttcattggggaattctacaaaacatttatggaagaaataatgtctgttctagaaaattcttccagaaaatacacgaggaaatactttccaactctttttatgatggcagcattaccttgataccacaaccaaataaagggattagaagaaaaatacagaccaatattcctaatgtacataaaatgcaaaagtcctcaggaatattaccaacttgaaaccaggaaatatataaaggatgatggaacatgaccaacttgagtttatcttatgaatgtaagactgttcagtatttcacaattaatcagtttaccatatcaataggaaaaatgaagataaacctgtgttaatctcgaagaaatttcctgatttgataaaaaggaatctatcaaatacttattgctgacataattcctaatgataaaagattgaatgttttcctcctaaaatcagaaataagacaaagatgtctgtccactcttcctacagctattcagtggaaggtcctagccagtccagtacatcaagggaaaaaatgattttggaaaagtaagaaataaaactttatttatagaaggcatgattgtctatacagaaaattcccaaaaacctacaaaactacgcaacatacaaaaaccaattgcctttctatatactagcaatgaatattggatactaaaattttaaatatagttccatttataatagatgaaaatgtgcagtagttcatgtccaatgatatttgcaggatatatatactgaaaactacaaaaccttaaataaaataacatttaaagaaatggagagatatactgtgttcttagattggaagactcaatattctccccaaactgatggatttaacatgattccagtcaaaatcacagcaggtcttttcctagaaactgataagccattctgaaatctatgtggaaatttacagttgtacaagttttccaaaattatttttgacaacccatcactagagaatgttaaagtaactgatcatataattccttcaagaatggtcattaaattctggatttcacagtttcttttagttcgtatttcacaagatagaagctttacatttttcagattaaggtagttttcacctttgtgcatgctacatcttggggaaaatactgagacaaaatgactcattggaattatttttgattttttgatactcggctgacaattatagtctgtgttatgacagttatagcctgtgtcatacgtactcagaattaactaacatagtcttcctcctaacttccctgcatattggaacattagaattcttttggttggttgaagaaacatcctagaattttaaaatattttgtatctaatgtaatgctgaaaacatgaaatccacataatgtatgcggcatagctaatattagaagcatgttcaaggagcagcctctggggttaatagagtttaatttgcaagacaaatgaaagcttattttctcctaggctctctgctcataattctagtagggccacttttgaagaatagtaccttcaacagacacagagaacccttgttggacagcaacagaacttgctcacagtgagacccgacatcccctccgctcagtgggcatttcctacagtgcagagttgtgcgttgaaaagtgcctcttcactccctacatgaggttcctcacacaaccccgcacctgggcgggcgggcgggcgtagggggcataaatggcttatccctatgaacttcatcattatgaaatgtaaaaatggacagtcccattgccccagaaacagtgggggagcttctaagtaaatccaggtttatctgcatttgggaatattctgcattttttgaaaatgatgttcccaggaatctttataaccaaggagaatccttactgtaaacattccacctgaatttttccaaaaaaaaaatagatcattaagaacaatagacaaaggaatatgcttttaaaaatagtgattatctctgaaggtgggattgtggctaatttttaactaccctggtgtgaccttatgtgaccctgtgtgagtcaacatgtctggcctcaggggtgtgtgtggagggggcaccctttgccattgcattacacaagtctttgaactgactgtccttcttactaaatgctattagcatctcttagtcactgtggcagccaaaaatgcttccacgttttctaagcattccacaggtgtatgttcctggcctgattcaggatagaccagtaactcctgaaagtaatcaaaggggccgggtattgtggctcacgtctgtagtcacagctacttgggaggctgaggcgggaagaccacctgagccccgaagttcaagactgcagtgagccgcgatcccaccaaggcattccagcctgggctgcagaataagaacctgtctcttaagaaaaaaaaaagaaaaaaaggtaataaaagagcaccaggaagcataggtgatgcacctcccatgtagagaaggctgggcgagcgaatgtgtagtggtttctgcggctccattgttagtgatgacttacggatggaaaagggagttttgtagctgagtgaaaactgttagaaaaccaaatgccgctgtcatgtttttgtctcgtgcgcttccccttcaccttcatccttgggcccatgctgtggccaactgaggagtaccctgaggttaagcgtcccccatggcaggtgaggctgtggggtgggaggagggctgggagatagcagattagagatctacaagagaatagaaagtttgattcaaggagaaaaactggagtaagcagtttggagaagtcagatgtttaaaacatgaaaagaaatgtaactttgagttgcagtggttttgagtttcctgatcttgatgtgccagtaactccctgggggctgacaaatccagggggaaggttcaaaggcagagagcctgtttgagctgggccagggcacagaggcttgctcagaagacgtggacggcagcagagcctgggcttgagagtcgagctccaccttcttcaggctctttccagcggggcgggacaaggacccacacatgctaagcgagcagggaccctcaagcctgtgactgttcgtgccagtgaaaagggcaccagtgcactgatttcttccgttcacccagaaacaacgatttcttcaatgttcacagtagtctgttaaccacctcttcgtggtgcatctttgagcctgtgtttacagcagtcctctctttggtcttaacaacccaacgtgaattttgtggcatgctacaaattgaggcatcaaagctatgctttttacattgacttttgagaaattcgacagagttctgaaacccaaatcttgacctttcatggatatgatggtaacctggcttgaggttttttttcatctctttcccaaactacctgttctttccatcggcattttaagtagcttgagcacttggtttcactcttcaatactttgatgatgcgaatatctgcagatgcctactgtatgcccagcccagcctctctacagagagaccttcccagccagccccggtctaacccatcatgctgttgagtgttcttcctagcagacatcattatattactcatgcattcattttagggggttatggtctattccattgctcccctctcccagagcagtgctttaggggagccaggtctgtcttactcccggtacacccagcacctgtaactctctagcaaatcctagatgcttggtgagtgagtgagtacattgaagtacattgagtacagtgaggccacacaatttaaaaagtgacaatggcagtacactgcggcatgtgctggaaaatgaagtccagggtgctgggtggcctcatggcagggaggctcccctaggctggcgtcggggccaggcagcctgaggatgtgaaattcaagaggacacagcaagaggctggaaggaaactagttggggacaggggtgagaggactcgattgaaggggtcccactgcaaagggccccatgagcccatccagagtgcttgggttccccccctgaggcctggtgagagcccgtggaagggccgagcctggggagctcacaccgaggcctcaattcctgcttccctttcagacacgcattcatccttaactctttatcagaagggaaataaaacctcccagatagcttggttgtgaggattaaattaggaaaaaaaataaagctatagctgttattggccttgcccggtgctcctggaccgtggttagtggatggagcctttcctcatcctccagcttcttgcctgtgtttgtagggctcacgacagcttgtaattatttcatttgtgtgggtcttactttttgcacatctcttcactgcgtggcaggtcctgtggaggcagagcttgggtctgttttgtccactttgttcccagtccaggcagaaggatgggcagggagtggacgtccagataatgaacctgaagtgagtgaatgaatgcactaagctcaagtcagggttttctttacatagaaattctcccacgctcctttttgcttttagtcttgaggatcaacagtgttcatgtactaaatcaagcctgaaagccctttttttttttttttttttgagatggagtcttgctctgtcacccatgctggagtgcagtagcatgatcttggctcactgcaacctccgcctcctgggttcaagcgattctgctgcctcagcctcctgagcagctgggtttataggcgcccaccaccatgcctagctgatttttgtatttttttggtagagatgaggttttaccatgttaatcaggctggtctcgaactcctgacctcaggtgatccacccacctcagcctcccaaagtgctgggattacaggcatgaaccactgtacctggccaaaagcccacgtttggcagggtggctggcagccttggggcctcatccacggtgaggttgtgtttggcctctctttgcaggttgatggctggaagggggaagggttctgtggtcaggcctgtgcttcatggagatgtctgaccgttgggactgtacctttcatcctttggatgagatgctctgccttgaggcagaagcatggaaagccggtggatttgtgcgtgtcggtggttttccactgggtctccaatccggactcagcattgtgggaccaccagtggctccccctgccacttcttgtggacacgttctttctccttagagcatctgttccaggccagcggcggtgttactttccagcctggggatgactttatggcgtgatgtctaatctccagtgggcaagtggtgaaggtactctagcatccatccagtggccagtcggccgagggcctgtctgctcatggggaagtgtcctctgatggcagcccagtgtcttgctaaccagcagaccactgcagaaggcaacgctggcctcctagaggtgtggcttgtttgcatctctatgtttgtgaccaagtcgtttccttccttggtctcagaatctgcttggcacttactaatagcatttgttcaacatgcatgatcccggtatgtgaagtacagatatgacatttataagccagacactgcgtttgactaatgttggcaaagtcacactaagagcctcccagtgttcagatggcggaagggaaggcagataggagtccagtccccaggactctgaggccccaccttgtgccttggtagaagtgaagacagatcgcctggggaagttggaagaagtagccgagacatttctcctggctcagagcagagggggatttacgttggcctatgaaggaagagtaagtatgtagaaccttcacttgtagagagctgagactttactgtcacccttgttttagggagcctacatggcacctaagactcaaatttacatttttaactaactgaagccaaataaaagaccttttatcccaactgggtacactctaaagtctcgacatgattatgcctgtgatcctgcacaaatcgtctcaaagatcttggaaaattggttagtgtcggggcacggtggcagttagtactggggcattggaagcaccagagcttaccttagctagacgtttccatcccgtggcagcttaacacgtggcatcctcactggtcttacagcattatggggaatgcaaaataaggacttgtctccttccagaagcctgctgcccatcagaaatatatatatatatatatatatatatatatatatattttcagggaatggtagagaacagtggagaagtagatgcttgtcaggcgtcttgtctgctgggccaaggtgaatcaggaggtgagagcggcggctttcctcttgtttgggcagcgggtgaaggacaggcgtggcaggctgtatggtgagtgtgggcatggccgcccctccgtcctctttcccctctggcccgtctcgcatctgaacacctgggagtctgtgattagacctgagaagaggaaatgaggggcagttcccttccattttcctcccagccgctcagtccaggtgtgtgtcagtttgcacgcctccctctggaagtccgtgtctctgcgaggctcctcagccccggtagcccccacgccaagtcccatttactcagggtttctgctggtgacggctctaataggcacttcacctgctctgcggaggcgcctgcggaatggtggtcgctctcattagctctgctcacccgcccagcgttacaggcagctggggagggattcaggggctgctgtgttcagcagtaatcagagcccttctgtgcacattcgacgctcaagtgtgtagtttaccacgggagatcaagaaatacgttaaatgcataaaattaaaggcagcggcctgcaggatccccaggtggcgtgtgctgggaattggatgcacttggctgtgtgtgtcacttaggaaatgcgctagggggtcagcagctttcccatcgaagcgttggttagtttgtgaaaagtaaaattccaaatatttgaaataataaggggccagatacgtttggagcttgagaagaactatttcaccagccaagagatcctaaacattttttggcttaatagaaaataatagcctattttgaacaataatctttgtaaatccaagaagaaaaaacagttcatctccctttatagggtctgatttgtgtctgttcaatttaaatagcggcaacagaaatacaagtgtctttgggtgattttgttctgctcttaccaacagatgacaatcacgtcttatggtttttgatttgacagaacggttcatttcatcagctttctagcagcccatttgattcaatttccctctgcagtgttttactgaaaatgacaaaaatgttcttttacataaagcctgcgagtctgtgaaggaacataaatgtgctgtgctgtttacatactaacttaattgtaatttaaatgcccttttcattccataaatatagccataggcttttcatttccttcaagccttcagctcacagagcagtttatatgtaaactggagtcagttgcttcataaagtgaatttctggaggaaataatatagtatatatcaaaatctagataggtaatgggaaattgattgtgacaatacaatattagaaacacatctccataatattttatttattacactttccaccttttgctgtcaagggaaaatatttcatcttgcaccgcgaactccagtctgtagagattttgacctcaatattctcacacaaatgaatatagtgtgtaaggtagcacaattttccctgtgtaaaatcatgcataaaaaacaattcatttaaagcatctaaatgtttccaaattactgcaggtaatttttacagcttaattcctccgagacaccattttaaatgaacccataattcaattttcagactttgcatttcaaatttttatgttgaaagtaatttcctttcttgcttaagttgtgctcagaaccagattcataaaatgtgtatgatgtatgtctgtagaatcagtgactgttagaagcttaataacaaatatgcaaggaagaaattaaatgatttttctcttcagtagttcagtttaacattgatttctaaaagaaatgattctgactttgccgctaagtttctttctttcactttttttcttttcttttttcttcttgcagtgttccaggggataaaactgtccttgtatctgtattttgaatgatttggaatcttttatctttgcatattcctttagaccagaaaagaagttgaataatgttcagactggctcccatgttaaggtagcacttagagattctctgaatatcatccctgaagctatggcttcctaaagacttttgacctcttaaattagtgaagagtggacaccaccgcttaagccctgctaagaccagttaaaagcatctgtggtctgggcggagggagctttgagtacaatggaaaatggcaccaccgtgttcatgcttgcgagctttccatcctgatggctctcctctgccttttcctgtggctgtgggatttttcaaaacccttttccatgtctgcccttcaatagaacactccaagtatccagttttattaatgtccagaagcgtaaatcacagccccctgttttgtcattccagtcattttagtcactaaaggattacttcaagtgactgaactcggctgttatctgtttgagtttttgcagccaggtcatctcaggggactgggaacaagctttctgcccccttaactatgtcgagtggatggctttagctggaccactttttgtgattgatgtacattctgtgtcgctgtatcttcccgcgacgtggtaatgcaaacttagaaaaaaaaataagatggaaatggtgctgcaagtttttaaaatcaagggttgggcagtgcagggggagctattgtttaaaaaataaaagttgggaggaagatataatggattttgtcagtggtattagggcgatgaggcattcttgagttcagcaaatattggcagataattctgctttatggaaactattaaatgtaattggtcacatcagagacacaattggcatctgtactttgaagctgaatctcctcaggttgagagagagaaagagagattaagacggactcttcagagaccatggactacagggcccaaagttataaatctggaagatgtaaataaaggaatattttaggctaacgttgctccaagaagcagtatttgcctgtaagaaatgtaataatagaggtgccaatacaagatagcaaaagttacccaggaaagatgttaagtgacatgctgtcttcatttttaaacaggacaaattatttaattgggaattttgccgacactgttgaagcaattatcatatttaaactgtttatcttctccacattctgcctgtattttttttcttctttgcattaatctttttcctctttagcatctagagagggtccctttctcgtggagatcggcattgtagaccttaaaaggtctcacttgagaaatatttttgatattattgaataattattaattcatgcaagaaacaaaaggaagggcactcaccggctcgtggccagagcagactctcattctttacttctgagtgtttgggggcttctagcgaataatccctggatgacgggtcctagtggttttgagaccaccagtgggtagcctcgccctgggaggggcttgagcagccttgaggtgcttttgtgctttgcacgttcgtaattgtgaacctcaacgcaaagcaggtgttgttgtaaatctggtgtctctgtggaagcaatgccagtcctctaattcatcttcgccaagctagaggacgcgagcacatgtgcaggtctgtgacctaaagcccttgctggccagggtgctattcttacctttgggcttccagaaagagccagctcctggtggagtgaaggtcctacctccagatgcctccgaaggtgccggtacgtgattggaataggaatgcgcatgaacggagaaaaccctcaccattgcgtccttttgttctttttgcgaggaagagatccatgggttggctcttactgaacatgaaatgttggaagtggaacactgcagtgttaccagtgagctgtgtaatcgccacctctgacagggatcctgctcgaggagcacgtctttccttggtgtggccgtctccaagtactttgggtggtggtaaatttacccttctcggtcacacactgtgaagatgtgagtttcccaatttcagcatttggagccatgtccttggtgagggcaggaggaatttgtcaccctttctcgatgtgcctgggactagggcagagacggttagtctcaggagagccaggtgtgccagctgcccctgcctgccatggctcccgcattgtggccaggactttttctggcagtggtactgcccgagggccgcagtcctggtcacattccacttggggacagagtgtgcaaggggctgatctgaagatccggctggaacctgggagccacaggatcctggggaccctctttggctgtaccccgtacctctgtatttgctcccacatgctgtctgatttctctggatggcctggatgcctctgttcccagcatctcctcggcatgctccctgcagcccttggcctgtgtccagtgggccccgacccggaggctcctgccccgtagctcaggtcccgtcttggcctcagccttcccttaggtgctcgtttctccagtacctgcagcaccggcgcttttagattgcattctttatgcattaattagtaatgtggtggtcccaggtgactaataagctaaagaaagaactagtgtgagtgaatttctttaaaggtcatttggctctaggaaaaccttttttttaagaaaaaaaaaagcattttatagaaatgttcaatggcaaagtgaaatgtaaagtattacatgttttttactatagcgaacaaattgcccctttttattccgtttatgtcttcatctgctacatttagccagatatatttgtctacctaattttctgcaaactggaagacataatcccccaatgtgaaaacaccaagagttacatgatgataattataactcatgaggggaaaagtgtcgcctatagaatccataccggtcgtttgcctgagagaacgtgctcatcctggccctgttggattgtctccacagatgtttttcatttcgtatttggtttgattaaagacaaaattcacccatcaaaaggaagaacggccctgcagagtgtgagttcttcattcgagagcatgtgctagttaaaaagaaagaaaaaagatatcttaatccaatttctgagctgcactgatcccaaattgaactgaatttccattaataactcaacctaaaaatcctttaggtgttctctgggggctggaaacagaggccggtggcgtggtgtgatgttcagcgttggccaggatcacttgcttcacccaggtgttgggcctgcacactgagtgcccgagaggaaaggttccgggaaagctgctgtcggaagccggggtttgtgggatcgtgtgtaggagtagatgtggaggggcttgtgtgaatgggggagttatgaaaccaggactgaagacaacagaaaggccccctgggagacaggtccctggcttgccctgtgcttccccgccactcggggggccggccatgcggagaacactctcctctcccagccaggcttcagaactggggggctcggcctccttcctctggccccagcagcccccgagcggagacgctggagttccagtagagtggagggaaaagtgtctttgacagcgaggtgagctgcctgcctgcacggtgggtcccctgggtgactcaggcccccttcctggaaggcaaagggaggggcacgtttctgaccctcctgagggaacggaggagactggagagggaacattctagtatgtgcgtgcgcccatgcgaaggctttcaaaggcctgagagcagacttcagagctgatcacaaagttgaaggtgggaggaggggagcaagaaagcatcggcactcagagtccccaggcatgggcacctgacacggtgctgtcccccgcagtggctgctgctgttggtgtgcctactgtgtgggggcttctgtgggagaggaccctgtcctccgcacgtcagctgccggagagtcagctggtgccagatggccggccggcctgcctgcctctgggaggcctcagtgcctgttggattccctgccatgcagggcgcacccacggggtgacgtgtgggaccctcccaagcgtgcccgtgcacccatgcagctgtggccgcagtctccactgttttgaatatttgttgtgttcctcctggtaggatgcatgatgttttgggactgtgctggcagctctgtcttccagttccttcccaagcagtgtgggctgagggtgccagcagaatgcccgccccaggacacgatccagtggctctcgggatccctccagggttggctgagaatatatcagtggcactgatcttgtcccagaatgcttggtcgtccggtcggctgtgacaaaagagaaacatggtccgggttatacacagcctttccttgtctttatttctagacaccctttatttcaagactctactccactggacttcatgtccggttattaataagcagttctcgttctgtcatcgagcctgctctggagttaactgtcaaataatctgaactaaaaagttaaatcatataggctttgaaaattagcatccctaagtctctgtccttttgtatttgaaaacattgatcattttccaccccctcaggatggccagtatcctctggatttattgctaacagtaactgctcagtttcacacccatcctgaaaccatttgaggtgatcctgtaattgccatgtgtgtgtattactaatcaaggctgctccctctacaaaacactgagtggcccccaggccgaggtgctgcagagatggcccgtgtgggaggggtaacgcctgcaaacccgaccctgatcaccaatggagtggcctcacgtggcctccctgatggtggcccttgactgtggtcagcactggactggcccaccctatgagatgtctcaggcagcttgcaagattacatcatgtgatggccaatgcttctgctaaacaagaggcagggagccgaatggacaggcctcaggaagcacagcgtggtggccgtcacagccttctgggaaggctatttctgcatcactgaggccccacagcccagggtgtttaggatgaagggcacagatttccagatgtgaagagtgtcaggtgggctaggggcaggagaagcatgaggaggaccctgtgctggggatgagaggagagcggccctgcagtcaaggggccaggtggagccacctttggggatgcggggagaacttggtggccctcagagacccctgcttggagaccccacctcccccttgacaagactgcggcctgtgctgggcacagctggcccagagcgagggccacaccctactactgcaccctccacgcctgtctgtccttgcccacctcggtggctgcctcgccgacccccgccttgcagctggagtagctgtgctgataaagatgcaggtgggaagctggatggtgaggtagcccatctgtggtttgggatccgagaagacggcaagacctcagcttcatgagaagagagacctgaagatccatgctggggaagggcgaggatggaaaggggtgcagggcgtggagcaggtgcccaggtcgggtacagagacaggcctgggacctggaggacctgcacgcggggtcgggcacctgccacactctcccatgtctttgaagcctcttgtggtagaagagaaggtgctcatattttaccttctgtgccttagtatgtagtttggtattgtgttaagtggacagaaatcacatacccctgctcactctgagcctgcatcctttgaccgtcactgtgaacctcagatcgagacaccagcctcagcgggggctgagatagggcattccccattcccactggctgcttggagggctgtgagggacctgctgcctggagcacagggcctgtatgggtgggtaagtccctggagagacaggaggaggcaggggtgtgcaagcctcttgaggtatgaggaaggtggccggggtctcgggaagcttgtctggccctggcaggcaggacaagggccccctcctgcccatacctctaccttaggccccttgtcatgacacgtgatacctgagggtggggggctgtatgggcatttggaatgtgacggcacaagccacagtgggtcacttgtttctacaaatgcctgagaagaaaactattcttctaactcagagaagtgggatttcccactgaaaatcagtggaaatcacttataatggtctttgcaaattccttgcatctaaggaagtgcctgtggagcagcagtgggaggaaaccattcaggctcgatggagagggtgaccgctgcaccctcatccctggtgtcagcacactaccgaggtgctcctggtttaaggacgtttgtgcacccacccggaggtatgcatggaaagaaagcactgcagccattccccagccagtgtaggggtgggacacagtcccgtgggggccccgcggagggcctgggcagatgcagggctgcgcactgccgtggtttcctgtgtgtctgccaggagtgaagacctgagcagcctcactggcctggtgtggaggggccgcctccgagcatgcggagaagtggtttgcatggctggaagtcaatgtttatctgtctttagactcagttgaagacacatttctttcacacattaccatttttaaaacccattaaggtctgattttccaaggcgctgaccctgacgcttctagagggcctcatcccggaagctggtggggagagcaggaaaatcttccccgttgagttttaaacgtccagacctttgttgtctccttgtgacccttgcaggagagctctcgtggcttctgtgcatgttcgtgtgtgactcgcccggctgagggactggcataaacaaacagggatgagtttgtaaaacactttgtaatcccttgaaaaggagaaaaatataaatgaaaatcactgtttaacagtgaaggcaggaagggagctgttcctcagtatagctgtgggttgtcgttacgtgagcaggagggaatttcactttggatggatttggattttctcttcatgctcatgctctctaaatcttgcaaaagcacatggtaaacacacagcgcatgtgtttctggaggaaacgcacagtgtccatatagagcaggcactgattttgcactgaaagaacgtggatgagaagttccacgtgtttaaataaactggcaacagcggtcccagatagcttagccgggcagcagtcagaggtgccctggcctggggactgagctaaggtctcagaagggtcagctagccaagctcttcaccggacaacccctgaattaaccagacacatcacagatgcagactgttgattccagggaacccaggtgaaaggccaaggagaggtgaggtagttggtgcggtgcccctcctggagtcccttcaggactatggcactacagttctatgtaagctgtcacccaggactcatcttcagtggagtctggactgcagtcgggaggtgacaaacatccatggcatgagggcagcaagagcccctctcttgggaaccagttgtggccactatctgcccagtgaacatgggcttcagccccgagcatgggagggctcctggttgggcatctccctgggagttccttggtactgcctcctgcagggtgaggaggggtggggcctacttccaggcctctggaagcagcatcggcatgtcctttctggtgtgaactccaaatatctgagatggtctcagttaatttagaaagtttattttgccaagattaaggacatgcgcctgtgacccagcctcaggaggtcctgatgacacgtgccccaggtggtcggggcaccgcttggttttatagattttagagagacatgatacatcaattaatatatgtaagaagtacattggttctgtccagaaaggcagggacaactcgaagcagggaaggggcttccaggtcacaggtaggtgagagtcaagtggttgcaccgagtttctgataagcctctccaaaggaggcaatcagagatgtctttctctctgtgagcagagggatgactgaatacaacgggaggcaggttggccctgagcagtttccagcttgactttcccctttagattagtaatttgggggccccaaggttctcctttcatgctgggaggagggtttttccacacgtctcagacccaactctcgggcttcttaacccaaaagaacttccacgcagaaggcagcgaaaatagtgcacttcattttctaagacatctaaagctgccacaatgactgtgagttaggtgagctctatgaattaggctagggatttgcaaccacttagcaagttctaagtaactgtaaaagatcccatagactgcaaattgtgtttcatttggggacagataccctgtcttggggatttaagtgtgtttacctgcccagagttgacacagacgactgtcccttagcttcctttcctcatgctggttttaagtgcttcgaatcgggattttcctacccatctgatgcattccattgaaaattcaggaatacacatgtatgtgactgtttattggcaagtaattgtgaaataggccagaaatctaccagcttcctttaattaatgtaacaaatacttagcaaggacctcctgcattctagggattgtgggggtgggggggggagcaacaaacaaaacagataaaccctgccctgaggcgccccttgtcttgtctgggggtggaggtggggcaggcgtgagacagaagaaacaggtaaaatacagttcaaagtcaggtgctggtcagtgtcttggagaattctaaagcagggaggagggatggggtgagttttaaatgtggtgactgctgaagaaatggcctctgacagcctggaggaggagctggagctgggggggggacaggctggccagctcctccaacacacacacacacacacacacacacacacacgcacacacacacacacacacaccccctctcccccaaggacccacaaggactgcggcctcttagcgtgtgtggagtcatcacactgacccttagcagtgtggcctgacttcatgaggcccccgttgtcatggagatgctgggaatgggaggatttgccaccctccagtgaggagcccccatcccatgagtgcaaagcctgaaccggcccttccctaattggcacctctatcctattttctttggctgaggaaattctcgtaaatgtatatttaatgtggtgttgagattggtagttctcccccatcccccaaagatcatcaaatctctgggggtctttcaaaacctaaaggtgatctccctggtcctattatgctgttttgtttttgcttcttttctttttcttgaaagacctaattgtggagttttttcccccttctatgaatcccaagtaaggaactaaaatggaagacgggcttctggctcccgctgcagcagatgggataattctacaggtgattgccctggaggtctgcaagggagggagagcggcaccattagactaacacagctctattattgactaatgacgaacagcgtcgccttgccttgccaccttaaaacagacacagggatttgctactctatttgttttataaaatatgcattgagagcaacaccaaaatgctgaatgacaggtgaccctcagagcacgcctggtatgcactgcgttagcttgccagtatttcttagagacttatttgattctaattcagtaggatttttaaccccaacattttgaaatcttgctttgaaagtccatgttattcccattaacgtcagtgagtttttcacatatctaaatatctaatatcatgctttgagaattgaagcccagcctgctctttaaaagcaagggagctcaccacatcctggagttctgcagtgatttgacatgtcctggaagaaattatcttcgcaagaaagtaagtttagttgattgaaatgaaattaacaccacatttctgtgtcataatgtattaacctgattggctagctggattccagcctgtttacaaacatcctgaagcctagatggccccttcctcagtgtccttaactgctgttctcgcccttagctcgcgtgcccaaccctaaggctgaaaacgccccctgtaggctactgtaagctgtagcattcaaggcctcccaggtgtcgctgtaatttcttgtatacattttagctccatctgtggcataggtaccattcaatgttatcttaatacactagctttggattttgtggctgcaacaataacaaaaaaaaatccttggttctgatgacttcatgttgtttcagaagatactcaaggccgggtgcagtggctcacacctgtaatcccaacactttgggaggccgaggcaggtggattacctaaggtcaggagttcgagaccagcctggccaacacagtgaaaccccatctctactaaaaatacaaaacttacctgggcatggtggtgcacacccgtagtctcagctactcgggaggctgaggcaggagaattgcttgaacctgggaggcggaggttgcagtgagccaagatcgcaccactgcgctccagcctgggtggcagagcgagactccctgtgtggaaaaaaaaaaaaaagatactcagatgtagctgtctctgcctgggttgttttctaaatgcgtttggctggagatagaacagatcctgcctctatccacggcgtaagggagttagcttcatggcaagctctctggagaacacaggccattgtacctgctcatgagaacagaagtgaaagtcacacagcatgcatattagttccgaggctactggcattattatttaatgatgagttagtgcaaattgaggggtgaggaagtagcatgtacaaaggccctgaagatgaatgactgtgtgaaattttgaagagcagtttagcccgaaaatattccatgagtagctgccaggagagcttttctggaacagtattaaactttagaaaaagtgttctgacatttatagactgacacgaaaacagaagtaaaagtctaaattgaaccaaagtcctccttaaagattgcctttgaaattgagtaatggcggatgcccagcacctgatgtttgggcacgggcgacaggacgtagggtggtcatccgaatatccctgccccactccccagctctctatggcattagtagatgctggaagatgaggccgtgttttctctttcatcacccgtgcagtgaaggatttgcgtggtctttggtgcttttcttctaaataatgaacaattatttcttgcgacattttggttttttactgccaattccaacagccatttgtcttttcagagctaagtttataacttcctcctttctctcctgtcacttttaccccattctgatttttcatctccctgccaattgtggtttcgtttctgagcactcatttattaatccttctttttcatttcccagaacacgtgctggtgtaaatctttttgcagttaaagtattacattaacctttttgatagcatggggtggtatctcggcggatgggcgagtgctgttcgcctgtggtctgtctcaggggttctagttggaaggcgtcctgcagccatttcttcagaggctaaggtgtgggggagcaccttggggaagaagaaaacatagtttctgcccttacaaagctgataccccatcaaacttgagattaaaacagacaaaaaacccaagaacctacagagcactgcagagaggccttgggaccctctgacagagtcagtggggagtcggctgggaagggcagcttttctgtcccagcagccttgcttcctcttcagcatgctgagggacatggagccctccaccattatctgaattgattccatctttctctcctgcctctgctgtgggtttccataatgtgaaattaatgcatgtgcttaggttgcggggggccaacccctcagaaatatgcaaagacttcaagggagaccttttcttttcacaaagaggaagatcccccacccccaacacacacacacacacacacacacgcacacacatgcacagtttgcatagccggagtagggagtatctctttctggggaatgttcgtatgtcactgttgattttacattgtttttcctttctttgacttgaaaatttttaaagtaacacaaatttattattttaaaaacttcaactctggaagtacagccgtaaaatcctctttccagaagcaatcagtcttagtcctttggaatgcaaccttataaatctgtttctgttgtaaatatacttccctgttcttacctgcctttacctggagagtacatagtatattcttttgtgagtaggactttaacttcctaatatatcataggctttccgcagctggttctgtattatggattactgtaatttattaacttttcccactttgagtggaaatttagtttatttccaactttttttttttgcttttatggtgttatgaacatttgtgtatgtctgtatttctgtgctgtgtgcaagtatttctgtgggatagacgtctaggagaggaattgtttggccgaagggcatacacatttaaatgttcacggatgcagcccagacccccctcataaggctgtaccaactcatactctcagcagtaataaagacgcgtccatttctcacacctctgcagaggatttctaaaatggctttttatttttcaaaaagcttacatttgacaactattgatgttgtgcaactttctgtgtttattagccaattatatttttttctcctttgatttacttatacatattctttgcttttttcgattgtttcttttagtaactctgcagtatggctactagtcctttgtctaacaagttatacatattttattctagtctcttttcttagcagtttagtggtgtcttttagtcacgctggagttttaaagttttccgcaatttaatctgacgatcaatttactggagtttccagttttgagtcctgctttgaagcgccactgtaagatttcgaaaaaggactatcttgacttacggttttgttttaatatttttaatttactggtaatttgctttcgtgtgacctgagaatgatctgacataaggtttttctacatagatggttttgctacaccctttccataggcttcactgtcatctaccctcatcactgaaatgtccccttcatcttattctgacctttcctgtgtgtgggtctagatacaggctctgttctgtccattgctattcctgggccagctcttccctgatagtaatgtggctctgcagacagttccacgtgtagaggatgtgtcctttttcattcttgtttgtaaataagaatgggggtggggacacgggaggcagaatcataaacaaatagcctgacagaacagggataataaaaatttaaagaaaaagggggttaggggaagtagagtaagatcatgccctactgtataggtcataggtaggaatcaaaggaaactatttcaagctcacagaccaggaagtggaagattaggcaaggaaaaaaaggaattaaaatagggtgaccagtcatcccagctcgcctgtgactgaggggcctcccaggacacggaactttccgttttaacactgggaaaatcctgggtaaactgctgggacaagttggtcaccctagattacagacgctataaaagatatacacacaaaggtaccactagaataaaaacactttacaaaatattaacctaaaagaaaaagcaaagaagactaaagagacacagtaaccctcactgcaattccagcatcagccaacaggacaaagcggaagctgtgtcaggaactgtcagggggcttagctgcttctggaaatgaaatttcacgttggcttggtaaggcagcccgtagctcagcacatgtgagcagcacatgtgaaacacagtgattcacaagggaagggcaaagggatgggcggtgattaatcaggcaaatgaaaccatagggaagcaggggttgccatcttgggattagaccaagcagaaatcaggctaaaaaggcattataagagacagatgagaacaccttaaaatgctaaaagtcacactcataatgaagataaaacccatgtaacacagaaaccacctgtataaagcagaacctacagcatacgcaaagagaaataaatagcaacacggaaattgtcagagatgttaacacactattctcagtacaagacaggtcaagtggccacaagtaaggaatgatacaggagacccaaacaacctatcccgtcacagatacgtattgaaatgcattcgctgagtagaaaatacgtctgtttctcaacatacatggaatatttacaaaagcttatcaaaaattaggttatgaagaaaagtttcataaaagaattgttacaatcaacattctctgatcacagtgcaataaaactataaattgttaacaaaaacaaggcccatccacctagagacttaaaacctattcttgaatgaaagtgtaaatataaaccaacgtaatagaatgtctgtaaaataataactctgtgtatcaaaggcatagttaatgcagtgattagagaattcatgactgtagacacctatatcagtaaaaatgagggaagaaaaataaatggaattaataccaaactcagaaaactatgaaaaattaaaagggaagccaaaaaagtataggaaaggaaataatagaagcagaaaataacgaagtagagaaggaaaaagcatttatttaatcagtaaatcaaattctaggtcctttgaaaaaaatttaaacagacaaatcattagttattttattcaaggaaaaaaatggggaaacacaaatatataaaatgagaatgacaacagggaaataagtattgatacagaagtttttaaaaagcacaagagactaatttgcaaataaatatgaaaacatttttgaagtgcataattaggaaaaatccagttttagcaaaattaaccccagtagagatagaaagcttaaataaaccaatttacatggaagaaacagagaacattttcaaagaactacctcacaaaatgggtctgagcccagttgctttcacaggggaattctagtaaatcttttgtgtagatgattctaatgatacataaattgtttaaaagcataagaaatgaagggaaacgtcccatattttttatgcagcaagtacaaattgaaacctaaacctggtaaagatagtatattgtaaggaaaataaaaactaatataatatggaaatattgatgcagaaatcccaatgaatattagtgaatagattccgacacctcattagtagtataatatacctcaacaaatataacctttctatgcccaggaatgcaagggtagtttggtattaggaaatctgttcattgcattgcagatgaataatataatcatgcaaaaaggaaggaaaaaagtaccaatgcaagtaacttaaacactgtactctgatgacatgtactcaattgtagggggaaaactacaaatattcttcttaataactttgtttttcatagtgatgtggaattatttcatgtgtatgtggattgagaaaatgactaagtgtgttgatgtttgggagaaccccctgtgaagaagagggacacttacatggagtaggcatcaaggaagaagttggtgcagttgacttggaatcagcatcatctatatggactcattatttctcaaacatgcacatatgtacacacttcttccagctctagctagaactaaaaaggcctagaggcagtaataccccagtcacaaagaacacacctagttcccagtcttattttcaaaataccatgcaccactgaaaaggatcttgtgcagcttggagaaatggctgattccaggatgggggcagcaaagacacaaaaggagcctagaacaagaagaatgataagcaggatgagaaggaagaatacaaaatgagcccagaattagcagggggaagagaagccaatttttaaaatgggcaaaacattggaacaggcacttcaccaaagaatgcatataaatggaagataagcatatgaaaatatgctcaacatcttcacccttagcaaatgaaaactaaaaccacaaggagattccactacatgcttattagaatggctaaagtgaactgacagtgccaagtgctgatgaagatgcagagcagccagagtccattgcgggggaaaatgctgaattacagccaccagggtgacagtcaggcaggtttaaaaaatagagttgaacatacacttaccatatggcacagaaatctgacttaaatgtttactcaagtgaacaaaaacagatacctactcacccacccatccactccttcagtcacccacccactccatcactctctctctcttcacccactcacccacccccccacctacccactcacccacctactcactcccccacccaccccccaactcacttacccccacacccgctcacccacccatcctctcccctctcccaactctctctctcccaactctctctctctctctaactcagaaaagtggctttactcagagtctccccaagccttaaacagccattccctcacttggagaactgagtaagtagataagctgtagttcatccctaccatgcagttcagatcagccctgagaaaggagcagacaattgatacatacaacatcatgaatgactctcaaggcattatgcatttgatagtggaagaagccagacactgagatgacattactccacttacaggactgactgtgggaggcaaaaccactgggacagcaaatcagtggtagcgagggatgggattgagggggaaagaggtttcctataaaggaccacaggaagtgcttaggatgatggaactctggcttgatcttagtgatggtcatgtgactgtaggtgtttgtcaaaacttacagaactaaacaccaacaagggtgagttttacttcatgtaaaaaatgttaatgtcatgaaagacaaaggctgtaaaactgttccagcttgagggagactgaagagacatggcgactgaatacaacgtgtgcctgtactccagggaaagtgtattgtgggagagacttaattgggacaattgatgaaattggctatggattatatgttagataaaagcactgtgttgatgtagaatttcctcagtttgacaactgtactgtattatggttacctaagagaatattcttaggaaataagatgtgtgatatacccaaagtaactctcaaatggttcacacaaacaaataataatgtttgtgtggggagggagggggagagaaagaaaaaacagtggcaagatggtaaaaacaggtgaatctaggtaaagaatatactggtgttctctgtattcttgtaacttttctgcaagtttaacgttatttgaaacaaattttaactatttcagtgttctagatcatatatctttttccatgcttttagaatgcatttgtcaactttcacgttttaaaaatccagttacagttttgattcagggtgcattcactatgtagattaatttgggatcacaatgaatttctgttaattttgagaaaatttatatttctgatattttcctatctaggaatatgctgttttttcacttattcagcacttcttttatgtctttccataaaattttatactatgagtcatagaactcatattttttgctaagtttagccatatatattttttaatgtttgttttataaatgagctcttttcacctcattgaaattactaatttattatttctgacatacagaaaagctgttgacttttgtacttggccattctgctaaattctcttattagttctaacatcaatttattctctttaactttctctaataatacctggaaataatgataattttgtttattccttcctaatatttttatctgttatttctttgtcttgtcatgcattgaccagaacctagacaacaatgctgagagtagtgatactgttgatggggtgtgcctacccaacagttgtagaagtttttgtttctaatgtttgctgcttatgaaacataagatggtaattaacaggtgattgctggaagttcttggcttggttcccacacctgaaaagcatttgtgatttactgaaaaccagtgcatgttgaaggcttcccagccttacataattgagattcactttgactgtcatattgccaaaaatggactcaaaccctgaagttgtatccataccatcttgagaatcagttgtttgaagcgtcacccattgtttctaaccatttttgttataaagataatacacacagagagaagcgcctgcagtgaatctttgtgtaaccatcatgcagatcaggagacaaaccatggcggcccctcagaactctgccacgtgtttcttcccatcttttcctgctgctgctcccagaagtaaccctattccgacttttctgggttttcttggtaatcaatttctggtttttctttatagagttgttgcctaagtatgcacccttcaacacgatactgttgttttgcttgtactttttgttaactgtacatataataaattatgttatatatttctttattgcaggctcctttaatccagtgttatgtttgggagacgcacccatacaactgcatgtcaccgtagcttgttcatttccagtgtcgtgtagtgtcccttcatgtgaatttatcacagtttattagtatcttccactctgatggacatttggtagttggaattttcattactaatgatgcccctgcctgtggtcattcctgcctgcctcttgatgcacacaggcacgcatttctgctgggtatgtcctagttccagactcactggttatacggtatggatgtaattattgttagttttccagtgtgattaaacatcagattagcgcccattagcaatgtctgaggctgcctgttgctccactcgggtgcccgtttggtattaggagcttcttcagccattcttgtgtttgtgttcatgtatctcattgtggttttaattttcatttctataatgactaatgtggttgaatatgtttttgtatgattatttgccatttgtatttgctctttttaaagtatttgtacaggactttcacccattctcttattgtgttgccttatataggaattatttctatgttctagatatggatcctttgctggccatatatgttgaaagtatctccactctttggcttgcctttcattattttaattgtgtcttgctgaacagaaggttttaatgtcaaggtagtttttagtcaatcccctcatttatgattggtgcattttgtcaggtttaagaagtcttttctctcccataagaacgtgaagaaaacatattctcctatgttttatagaccataggttggcaaacttttttctgtaaaggactaaatagtaaacattttaagctttgtggaccacagatagtctctgctacatattcatcttaaaaaaaaaaaaagaataacctttagaagtataaaaaccattcttagatgctgggccagagtgggccaggctgtactttgcctgttcctgttctagaagtcacagttatttgctctcacctttacagttatgatttcagttgcagttggttttgttttttgttgtttgggtttacagcatgagacatgggacatctctaaatggatatttattcatgttgagaagtccatttattccccatgtctatgcagtgacccctttgtcacaagtgaaatgagtctgtttctcagttgtctattccattttattgtcctatttgcttattctcccaccataccgcactactttaattattgtagctttataacaaattttcaaatctaatagagaaagtacttcatttgttctttttacaactgtcttggttattcttggttaagacatttccattagtatataaatgaatcagtttgtcacatttcagtttcagagtaatttttaaaagaactttttctttttgaaatgtagagaaggtttttagaaaatctttttcttcttgaaattgtagagaaacatctctacaattttgagtcatcaaatctgtaaacatattatagtcctccatttgttgaggttgtcttaatctttcccaatcatgacttaaagcctttccctacagaagtcttgcatacattttgttggatttattattaggtagatgaatatttaaatatatataatctattgtaagtgttatgcatttattaattggcagtgcttccttaagtgtttgttggagcatgctgctgaaagcatcttggcttatacatttccatagaagatttaaaattataggacactaggtttcctgatatttttgtttttttaaaaatcaacttattttgttttactgcaatttttttttgttaagagacagagtctcactatgttgcccagactggcttcaaattcctggactcaaacaattctcccacctcagcctcctaaaaagctggaactatggatgcacaccactgtgcccacctctaatttcctttttttcctgatctttctggctggttgcttaccaattttactcacctttttaatgaccccacttctggttttactgctttttcttatttttttgtttgttttctgtttcatcagtttcctatatgagatcaacccacagacatacaattttatttgagcatttgtattgcttagaaagcatttataaaattttattaaattcttctcgacatttttctttcagcatggcattacactgcagattaataatttccaattaaaggttgggtggaagctcttcaattgcacagttaaaaagactttgaaatatggagatttctttttgtacttgccttgggatccacaaaaaacaaaacactaccagaacagtaatttgtgctcagaaattatatccactgtaaatttctgtgggaatagaaatctggagaagtaaatgaacagctgatgtttcttatgattcagttgttacttttcatcacaataactttactgaattttaagcatataattactgttttgccttgtaactttaggttgaatttatttttaaaaaatataaagtccgatttacaaagctatttaatgtttgataacaatagttgaaggaaattcttttgattcagaaaaattttaatatcaaacctgaaccataaaaattgcagtaaaacgttactacctctgctaagtcattgaagtgctttgtgatacagtatgtcaggatatccagcttcagtttctgactaaatttcatagaaatgattgtcattaggtccgtgagcatcaatgaagtacaccattgattacactctttaaataatgtgcaatagattcagattcacatattttatgcagagtacctgctagtaggtaatatagtaaccataggccttaacattttcataagtttttcagtttagccaactaatccttttttgcttcacacaatttcacaaccaccacttataacacatcttagcagattccacttcaggttgtaccgaagtagtactttctcatttttctgaaaatcttttctttggatttaaaaattttttctttgaaaatattcttgccatggccatagtttgccagctgttaatctagctttcaaaataagaaaccacaaagaagagaaaattgaaacatagacctagtagaagaaaggcaataatgaaaagcataaattaatgtaatggaaataaaaaaaatttttgagaaaatcaaagaaaccaatagcttatttcagttttgaagacatcaataaaaatgataaaactcaaactgagaaagagattacaaattacccaaattgatgtggtaagaggaaataagtacagatcctacagacattaaaagattatgaaggacatattataaacagttatgccagtaaatgtgacaacagacaaaatggacagaatcattgaaagacacaaactatcaaagctctctcaggaattcgtaacttagttgctgtggtgcctgtatgactgtacatgtcagtactcattgaactgtatgtatgaaaagatttaatttttctgtatgtgaaaattatctcaatttacttgactttaaaatattgtttaatgctgtcagtcatttgagctacacgtagatttaccatttttattcttttcatcctttctgtgtctgtagccttctttatgtgataatcctccttctgcctgaagaataccttttcagcagcagcaagctgaagccagccagctccgagagccagttctttaatttacgagaattttatgagctggctgtcaaacacacccattagtaaaaatcgaattacataaatttacagttaaatacattatgtttggaaagagaacacacattcaaaactgattccttccaattattgtactaattgtgctgttatccataccttggaggccatttttatgatgctgtgatactccacatttagtgctgtcaccttggtagcttgaagtcagtcctggtaggaatatttacacagcagaaattagcaaatgctactaattagaagtttatttgattatctagaccagaggttggtaaactatggcctggggctggggctggacatctttttttttttggtaaataagtatttgtcaacacagccacactcatttgtttatgtcttgtctgtggctgctttcatagctcagtagcagtcaagtgggagcaactgagacttccggcccacaaaacacaatatatttactatctggccctttgagaaaatgtttgccaaccaaaatctagatttcaaaatgtgatggagaagatgttagtaaggtgcattcattttcagatgtcttgtgtgtaactgttacattttgaatagctccagaaatttagcccctcttccagtggttaaaagtatcatctcattcaacaaagaaatcgctcacgtcattgccgaacacgtgaagttctgacataacatcttcatcacctctgtctcgtcactttgcagcattcatgtagaactgtgtgttcaccagttgcaacctcagattggctatggacatgagtttggcaaatatcaacaaagtcatgctataagaatcagctggctatacagaatttacaacaaagagtattgtgtattgaattatttgtaaattgtatacttcacatcctttatatcagtagagtttattctttaagaaatgcacatctacatgaatacttgttttggaatgccagctaaacatttatcagtacaccattgcctttatttcatttcacagggaattgctggcaagttctggtttcagtttcttttttagaaaatgtcttaattgtatctgtatttttatatcatttgttataggggtctaggtttccagttattttattcagaatccagagatactgtgactttttcttcaggcttccatcattcttcttgagaagtcagctcttctttcaagtaatgtcttttctctaaattgagatctgactaggtgtggacaccttttatttatcttgctttgagatcacagggattcctgaatctatagctcaatgtctttcaacagtttcagaatgttctcatctcttacttcttcagaggttatttttgctccattcccttgaatttccttctttgaacccatttacgcatcggtacacttccctgtatcttctaaatctcttgttctccgttatttcccattattttatatccgtggggtccattgtgttgatttcttctgatcgctctaacagttcattagttttctttgctactgtgcctaatttggttttaaacccattcatagaatacattatttcaatgatttctcaattctagtattttcatttttttaaatagttggtgattctttcctgaatttgagatcttagcttttttcctgcttgaaggtagtaaagcatagttattttacattccaacacctggaatccctgtgatctattttttgtctttatttctgccatttttgttcatattgtcttatctcctcatgggtctagttgttttttattttgtgccatattagtacattggagaaacagtgtgtagaaatgacgtattgcccgggaggatgttttcttcctctagcagtgcttggggcaccggcagtgtgggatcagctcattctaaccctagggattaatacgatcagagcagggctgtggctcttttgaggtttgctctagtgacagctcacttttactcctacaaggtggccattcagattcttcccccaagttgagggtgctcaaaggaccctgcaagacactgtctgttgccccagggcagtcacctcgcaggaatggtgcttcatcccagggtaggggcagctcctgtgctgctgtttcctcctgtacgctggcccaaaattgtcgctgtctgctcttagaatatgacccactcctttcataaagctgagttcaaatcccacatcccaatttaaaaaaaaaaatcatgttataagcaacactaacaacaaatccacttttctgtcagccctgcccacctccccatcttcctttctgagacatgcagcatttctctgcaacaagcaaaattttgtatgtgcaaacacaccctcccaccccaaactttattttagtctctgtgtcttggttaaggtgtcttcctcgcagtgcctgccaccttgcggtcgagcccagctggcaaatgaagctgagctccagttctgcctgatgcaccaccccatgccttggtcttctgctggaggctgggggaggtgagcactggccaaggaccagccctctggttctgtccacatcggcttgatgcccattcaggggttgcaagttctcctggtctggatctattagttgaagaaattgccacctcgtaatttcaaattagtgggaattaaaaatttaatgggatgtatgtattttttggatcatatgaaactatgttttatgtggtatttaatgtgagtttaaatatgcttactaaatatgacttttgttaatatctcagttgatgctcgtgcgaaaaaagtctgcctttctacctttctttcctacctttctgccaaacccagtccttttactaatattttaaagtattgatttgaagcagcagtgtggttgcttctgtctgggtttgaacaagtaactgaattttaattcctgagacctcttacatatagcaattgtcttggctgttgtaggaaggcagcaccctcattcctctgatttagctctctttgattctacaggaagttgttgccactgtctctttttattaaactaaatgccagaattctttcatgtcatcataagatgttaatgcatattgctttggggaccaaagtcatacaattagaaaccactcaaatgcttttttattctaattctgaggttaccaattccttaaaattagtaaattttcactgattttgcaagccagttgtaaaaaaaaaaaatagtataaactcctcactgacggtagtttggaagctgcattgtttggatgtgatgtttcagtgccacacacgttagcggtgggaactggaagccagtcacgaatcggctatctgcttcagggatctggctttgcactcctgcccctgcccctgaagtggctctagggacagctgtggtttgagtggactcttgctccttcctgacctcttaatggccacatggacccccttgcttatctttgagagcagggccttgatggaaatgcaaatgtgtttctctttggtaacccagataccaaaaccaagtgcagtcctggaaggtgaaaagagtttccaaaggaaaaataaaagacacatttctaggaagcatgggaaaaccttggtggctttgtcctctggtgacagcagcctgggggaggtggagtagctgggatgcccccagctttcgcctcccctgggctctatcctgcatgttcttggtccatagccctctgtgggccatatctttccagcatcagtacctgttggggtccgtgctaggaacacagcagtgagagatgaagatgtggcctccctgaccgcctggagtccacagtgcaggggaggagggtgactttcaacaactaatgaacaaagcgtggctcagtcgtagctgagagaggcactgcccaggagaagtatgaggcatcgtgggagcatttatcagagtcagaggaggcttctttgagaggtagcttttaaatgagatctgaaccacgtggaacaagtaagagctcacgagtgcctgtgaagaaggaccccaccttgcacttgggggacccgaggaggacctgtgtgcttgccgtgcaaagcagcaggacagaggacccagctgagggccaggcgggagcaagggcccagcacactgggaggtttgagagggtgtcaggaggccatttggatggagaagccacgggcaaccagaggagtttcgtctcgagtcctcaccctggctgtagtgtggtgagcacattggatttggagaggttaggcagatgcaggcaggccagttactggaccatcatggtggtctaggcagggaatgactgggtttagactagtagaaggatgacagcagtgacgtctgtaagtggacagattgccggaagagttaggagtgaaaacgaggactttgtgattaaatagggccaaagaggaggataaggcaggcgtgggcccgtgttgctggcatgtgtgactagcaggaggggagtccccatcagaaggggaaacagagcaggaagccaggagtggcgggaacaacgcttcaaccttgggcctgctcttgttgaggtccagggaaccagtgggtcggatccgtgagcatgcaggcatggagctcagagaagcagcatgtgtcagagatatggcctgagagccacacacccactgctgctgctgtgatctccttgggtgagagcatcagggagaagagagaaagacccagtaggtggtgtcgccaagggagcaggccgtggtgacagaggctggtggaaccatcgggaaaaagggtgccagagcccatttccctgtggcagccaccaccccctcctcacaacacccaccaggtcccttttccttaaatcaaaacctggtggatttcaggggcaggcgctgctcagttgtggcctctgcaaggtcccggccatgtgtcaccattgagtagctgctacctggcactgcgccgggctctcatgagcacatgtgagtgagggagggaaggggctccattggctgagcagggtgcaccctacctctcctgtaactcccaggagtggccgtcccacacccagatggggagtcggggtgaagccaccatcctgtgcgtgaatcaatggaaggcaaggctggactcacccccgcctttccccagggcattgggccggatgttactgagcctccttcacttcctcttccctgtggccgccccccgaccttcatttccttggtaatgggacactttggccgctgtcatggttggccaggctcggtgtgggcggcacccaccagttccttctgtgaacatacaggttgatggcaacagcgctggggccatggggatgactgcggggagaagggctcatggcagagcaagcgcagtggaccctctccctctggccagtgttcttctgtgaagaggtgcatctctgcgtctctgcggcgtactctgcgagggtccctgtggaagtggctgagatcagcaagacgacgtgtttgcaggggttgggccacaccaggctctgcacgtgacatggagcctgcagctggaagaacagtctgtttaataaaaaataaccatttgataattataatcacttttaaattgataaatggattcttttaaataaaagaaaccattaagaatgattgttctgcagaaaaagcacatgaggaaatgaaattttctatctcattgggaatttcttggtaaatatgcaagcagatacatacattacatttagattttagaagtaaaatgacctcatatactttacttttttagcacagagaattctgtatagcataaagcagtaaatcacagatactgggcattatgagtgtatttttcttttggaaaaaaaaacattgaaaaagcagagttattaattggagtcctcaaggtccttatttcagtaaatctgaaatggtgaccatcttacccatagctaagttgggatgccaaagccatttccaccatcagcgtgctagtagtaaccatccaggggcaaagcggctgattctgcagcctgggcatgtggtatgtgggtgtctctgatgggccaagggaaatgacaggcccttgtgctgaagactgataggagttgatttacatgaaacacatgtgttttttttttaaagacaattttaatgcacatattttcattttcagctttatagtgttttatgtcttttgcctttgtgatttaaattgtcttatattatttataagcattttctattatttataattatttttaatgattttatgtaataccattttatttctagcttgacctgagttggcctatgctaacacatttaagctttcctaattcccaaggttaccataaatcagcaggtccctaacttctgtattcatctctgccctgtagagaatagccaacctcaggttttcgcagccatgcctcatctctctgtttctctaaagggaagccatagcaggtgcctgggtaatgtccagatctgaaaaatcccatgtaacctggagttgagggcctgtctttcacccagtctgtttgtaagcagtgcctctgcccccaccatgtccccacctgacaggccagctcaacacctgcctgcctcctcgtccctgctctaacactagtcagggcgcacagcccagcgaagtgctctgtctgctgggaggaggtactggctgtgatcggactgccccccacaaagccctgagcaggtgaagggtgtgggccagccgggggcgaaggaacaggtcaccgaggccactgccagcaccaccaagaatcaggccaggttccgggggcatctctgtccccaccagcagcactgcccttcagctttttgatgaggccggttgttggccataagaggagcggtgataagtttagattgttttggtgtctgtaggtcattactggaattacaccagccagccatgaggtcataaagttaccttgacagattgtgaatgccgagtccacagtaactctggagggctgcctggcatcgtccttcatcattgtccagaaacgctcctctcgggaaggctgggcgtaaaactgaaaagaggaggctcaaggaaagaacgcctcggtggctccatgcaggaaacattatttctgatttcaagctggagagagaaaggactttggggcccctgttttggaggcctggagtgatgagtactgtgtctccaagctcagaatgaagccaccagtggtggctgcctttgtttctgcactttcagttcctgcaggtgcaggagcttgccagggctgctgtcagggacacttttccaggccccgctgccctggctgggtttccttctctgagcaggaacaagtgcccgatgctgttgctggtgcagattggagggctgccagggctgggtgactccctgccgcattttgccaagcttgtgtagctgcttctgcctcttggaggggctgtgttagaaagcatgcatcacctccagttacctcaggcagcaggaaagacttttaacctactaaacaagcgtcttccctgggaaaatacatcctttggttgagactgtaggagacacactgtaagttatttatcttgaaccctaaactgcatgtaaaaaatgtaaccaaaccctcagtgcctggggcgaaatccactccctaatgttttaatgacacaggatccactatgctacgtgtgcaccgggtgtagacttggtccagtgcatgtggtgctaagccataagggactgttaggaagagccgggcatggtggctcatgcctgtggtcccagcactttgggaggccgaggtgggtagatcacttgaagtcgggagttcgagaccagtcccggccaacatggcaaaaccctgtctctactaaaaatacaaaaactcgccgagcgtggtggtgcacacctgtaatcccagctactcgggaggctgaggtgggaggatcgcttgaacccaggaggcagaggttgcagtgagccaagatcatgccattgctctccagcctggatgacagactgagactccatctcaaaaaaaaaaaaaagaatcgtgatattcttgataggaagtaaatgttagtcataggattacaagattttattctaagctcttacaagcaagcagttcagattaatgtgttttcttagaaaacttgatttgattaaatttcatactttttatctattccccaaaatttatgcggtccttgtgtgcttgagggttctaggaacaaagtgattggggaaacaccggtcccctctgctgtgggaccctgcgggcttccagaactggcgtgaggtccgagtcgctgtgggaccctgcgggcttccacaactggcatgaggtctgagtcccggtgtttcacaatattacttgaccaaagagcgtttttttcacaaacacatgaggcagcccatgtgactccagggacccgcaaagcacagcttgagaaatgttggtatgtttcaatggaaatgtatgtaattaagaatattagtacaatatttattaaaagtttctgtcttgaatgaagtaataggatatcctttaggaagcctgatgtcgggacgtgctgtggggtatttttatgttaggtgttaacattcagcaaacaaatccaggctctacttttatcctttaatgaaagattttattttttattcagcattggtgcattgaggacttacagccatcttatcttacctcgatgccattgaaacaaaaaaattagtcatagaaaacaaacctaatgccttcctttgcaagttccagtcagaagtgtcgcatataccagacaacacatcatttttatagttatagagagaactcctatgtacttcatgggaatacaaaaatgtcacaaaattaaaaggaatttttccaaaattactgtgactgaacagatcattccacgctccgttataccattctgatcctaatcccatagtttaagtgtagaggctggaaaatgtcttcgatttagaaaggaaagacaggcgagtgctgtacaatggtgcaattcagtggccaacgagcccagcagtcgcagaccccatacattcctctcgttcatatcctatcgatttgtgacagcgatcacatgctattgtagtacaaggaagaggtttttttaaccgactgtatgacttgtagacttttctgtgaattttcattaaggttggtgaattgtacaagctgaggaaagccaagacaagctagttaaaatctcctggcacacaggtcagcctgagttcagattttatttcgcgggcatgattttggggatcccgtgctagattgtagttgtgttgtaataaagccccctttccagcgctgcagtgggttgtggaaattgttgagaggagaaaccaccttctcctaggcatctgtatttggttacccgccagcactgagacatgcaggcatggaaaggcagactcaggaaggttcaggaattctaccgactttggagcatgctctcccccggatctgaaacactggcccccgtcttatccacccaccactccttaagacatccaggcgtggaagggaagattcaggaaggttcaggaattctaccgactttggagcatgctctcccctggatctgaaacactggcccccgccttctccgcctcccgctcctttaaccagtcgtcaggtatttcctcaggtacccgctctgggaagccttccctgaccctcctttgcccccgtggggacgtggctgctgcttcccccgtgtgcctgtggccccttgtgcccagcgccatcgccactccgtgagggtagatgtgggtgccggccgtgtctgatgcctccccacaggggccttgggcacgctgtgtggacgctgcctgtgcgtgcttcctgagcgaccccatcagtaaagcgtcgccaccatgcaatgctgctggcagtccttgtactgagacaatgtggtagctgccatcctgaatttccctctgaaactgctcccaccaccagtgctgcctgtgctgtggccctgctttgtgtcctgtggcctaacactggagcgccggctgctacctgtctgtctcctgtgctggacaggaagcaccatgcaggcggcgttgtcgtccgatggtctccacctgtggccgtagcaccgggtgcgctgtggactgggacacttccatgtcactccacacgtgtgccccgctgtggcactgtaaatattcatttgagctggtaaggaaaatgacattttaaatgccatgatgatatatagtgtatttctcatgtgaatcacgttttccttagtatggctcagcagcacgccatgtttccgtcccatagagaccatgcttcctgtggggacgcccatggtcctggctacctctgctgaaagacggccaaggtgactcttcagctataagagagatcactcatcctggaaacttgtcagagcaggagaattccagaaggatcaatatttttaaaaaattctgttcctaaacttttgctctgcaaaaggtcttgtaaaaagagaacagagacaagtcagcccaggagaaaataccattgacctttgaacaacacagacttgaactctgtgggtccacttacatgtggatttttttcaaccaaatgtggatggaaatatagtgttcacaggatatgaaaaccgtgtatatggagggccagcttttcatatacacagaatctacagggctgattgtaggacttgtgtaggtgcagatttttgtatccatgaaatcctggaggcactcaccagcatataccgaggaacaactgtatttgcaaatcccatatctgacagaggagttgtattcagaacatgaaaccaactctctaaactcaaaaataagaaaataaacattccagctagaaattggacaaacaatctgaacagagacttcatccaagaggagatacgtaggaccataagcacaggaaacaatgtttattgttagccaacagagaaatgcaaatcagagcctcagtgaggttccacgcagagaccacacactcctacagccactcggagaccacgtggccacttcccagaaagttaagcatctgtttccacaggaaccggaagttgtacttctgctcttgtatcctaaagaaaggaaaacttatgtccacacaaaaactgtacacaagtgtccatgtcaactttatttgtagtgacccccaaattggaagcaattcagatgtccttccaaagatgaaagaaaaagcaaactgtggtctatccatacaatggaatacttatgaaaacagaataaaaagcagccaactattgatacacggtacaatttggatggatctaaagggcattaggtggagtaaaggaagctaatcctaaaagataggattttttttgtatgtaacactcttgaaatgacaagcagtgatggggaagagataagggttaacagagactggggacagatgacttcgtaggtgtagcctgacaggtgtctttgtgatgagacagttcagtatcctgtctggggttttgtgcatgtaaatctaaacacattataaaatttcattttaaaacataatttttaaaagtccattaaaaataaaaatacataagaatttaaaatgtttgtaaaaactggtgacatcaaataagataggtagtttagttagatgtattgtatcaatgccagcttcctggttttggtaacgcatgattatgtagaaagttaagctgaatgaaggtgcctgggaactgtcactaatatttttcttgtgaatcttcaatttcaaactataaagtttaaaaaaatttgtgccttttacataccagttttttgttgtttttgagacggagtttcactctgtcactcaggctggagtgcagtggcgcagtcttggctcattgcaaacttcatctcccgggttcaagcgattctcctgcctcagcctcccaagtagctgggattataggcgcacgccaccatgtccggctaattttcatatttttggtacagatggggtttcaccatgttggccaggctggcctcaaactcctgacctcaagtgatccaccagcctcggcctccctaagtgccgggattacaggcgtgagccaccacgcccagcccatacccatttttaaaaagagaaaatggacaagagagcagggaatggcgttggctttgctgctgtgagtcttggaaaacccatttccagtgcaagtgcctgcgtaggagtacgggggcagcattcttgtaatgaaagtgagccctaaagccaaaaggtgatattccccctgaaatttaggaaagaaaggaaactcttaggctggaaaaatgtggctgaacttgatactgttcatttgatggttctttgattagcctcattacctagtatttgaacaacataaaaaattggttaagaatagccaaagagaaaatgcccgggtgagtgctaggcgtccatacacatggcagcttttaacaacgtgcagccatgaaatatggaaaacttcctgacgttgatcacagttgaaacttcatactttcttaattcagcctcttattgacagtaatatattttaactcaagaatgtgttcattcagtgtatattgacttggcttgttgaaatgttcacagtacatgtgaacactgggtttcctgtcatgatgacttaagacaggaggacagcagtgagtgattcctgccagtcaaggaactttccctggaaccccacttgaatggtaataatctgctcctataattgctgtggaaaaggaaagccctctggagattttacatctaatcatttatttataaatctgtagatggcagtctgcagaagatgtgtcaggggtcaactttgtgctcaaaacagttgcctgatgtttacatttcacagtgtatttttttaacagtacctccagcccccatcatcacaaaaggaccctggcttgctggtagctgctccccactcatcccacagcccagacacttcattacagatgcctcggcagaggctggtcccctctgtatttgctgaaatatgcatgtttttccatctcattaattcagtctacatacaattaatttttgcctattaataaaccccttggtgttagcgacagctatctaaaccacttcacctagtgtggaatgagcaagtgtacttgcaaatttccatccctggtctgcattttttagtgttgtatttgtgggttggagagtttgggtgcataaatcaagcattgtgaagaaatataactgccgaagactctgggttcagactggctgatgggaagtttgaaatacgaattagttccacattaattggggatagagggagatgcaggggggccatcccagcacgtggtagtcagggagggtctctggctatgggaaaatttgtcagccttgtatgtgcgtgagaccaactttctttttccacaaatacaaatcctctccaaattggacacttctcaaaagatatcttttctgtgtgttttcaaatctcataatttcttaaacatctaataaagtctgtgaatacacgtaagtgattgtgtatgtggtaactacaccagccaacagcattgaaaggaaaaaggaagaaaacacaaaaatcagaatggagccttgaagttgagatgagcaccacctagctcatttagagacatccacaggaaaggaggttccccaagacttttgttatgctccaaagccctgagacagatccatgtcacaaggacacctttctcatggttcaacatcaccagccaggaggaaatgcagaattctgtataaatgttaggaattcttagatttctcacctggatttgtaaaaattgcagttcatggcgagagacatccgggagatccaaatgccatcctcctagaacttgctggaggaaccagattctttctaagcgatttgcatcttgatgtgatgctacagttctatgacaggcccgagtagctgatgaaattctacgtgggaaaagcttttgagtgcctgtcctggtaaacctgtgacagtggcatcacataaaggtttccagaatgttctgtgaggagattgagccaatgtcgttggtcagcttaattggaagcaggtgattgaaagtcagataaacatgcaagatttgctgatttttaaatatgccatatgtgtcaaatgtatgaattgtgatgatggacaagaacactttcgcagctttaatgggagcatgtaatgacttgaacaagactgcttagttttggttactgatgatcaagtacagaatcttgctggtgtctccaaaacttcctgcctggcctgggcagctgtcctggctccctctggccagttctctgccaggcagccagtgtgaatctggaaggggctagtcctgtcttcccctccctgtctagtgcctttaacgtctccgctgagcctgccacctcctggcctcctcgaccctccacctccccgagccgtggaggtgagtcctagaccttcttctgtgggctcctctccccggggccctttcggctcagccccacttctcttattcacccacttgtgttctctgtagctaaatgatacataacaggaactcgttaagtagcttgtgcagtgaatgagttaatcctaggtgttttcagaacagtgaatttcaggttcctgactccgctttgagctcattcaaagaaagtcatgtaaataagacctaatcattgcaagaagtctaatgaagaaaccattcattatctctggagatgggcaggtacacctcacagaaagtgaagtctgttgctgatgaatagtctgcatgcccacatcttcctctgggtttctaagtaattgaataagaaacgtttctatttatattcttatttatgtgcaactgtatttaattattccctagttttgaggattggccaataaaccttttcttcccttttgccattgattattcttaagtttaagacaatgcccagtggcagatgtgcttaaccgccatccttcatctagttcatgtgactttttaatgtcaattataaagaaaattactcctttggcttcagaagtttatttaaatctcttctgagaaaattggcagctcttcggagttaatgtccagagcagcagaaacagaaactggagggcacagactggtggatatgtgaacagaagcactttttttaaacaaagttaaaaaaaaaatgttatgctattgctaataaattgagtcaggggaaagaaaaaaaaaagagatccctaaatcagcttccaagctgccattaagatgggcaagtaagataattccacataaataagaccagaggccttgtctctgtttttatttatgtatttattttattatttttttgagacagagtctcgctttgttgcccaggctggagtacagtggtgtgatctcctctcactgcaacctctgcctcccgggttcaagggattcccctaccttagcctcccaagtagctaggattacaggcgcccaccaccacatccgactaatttttgtatttttggtagaaatggggttttctgctgctctcaaactcctgacctcaagtgatccacccacctgggcctcccaaagtgctgggattatagacatgtgccaccgtgcccggcctgccagggctgtttttaaatgaggatttctccatttaaggaggtcacctgtcctggacggtatttcctaaatgcctggcataggtgacatcatgcgaacaagtgatggttcagaatacagaagtcatgagtttgaaggctgtgatagaggaaggccgggagagaagtgagaacagaacgtgcttgccctgggcctgcagctgttgccagcatcttctgtcagctgatctgggcagggcgtgggggttcttctcaggcctacctcctaagaacaaaaacatgactgaccacgagcctgtcctcaggatgcagcctccatccttggtgggcacagctgagagaggaagttctgagctgctttggggtagggctctgttgcactcaccctcccatctccttagtcgctgcaaccctgtgtcacaaatagtaggttctcagcaagtgtgctgaaccaaggggtaagaacaacgtttttatttttttatttaatttatttttattttttgtttttacatttattttttaatccatttggaatttttctttttgagatatatataatagggatgaacttttatttcatttttctagacaggtgtacagttaccttaggtacatatattgaattgttatgtctcaccaatgcaccacaacgtagcagtctctcatagcccgacgtatcacccaaagttctttgtctcacgaccaagaaagttaaggagcgccgacgccaagggtatcactggactgaaaatttaataagcaaaagaagaaagctctctggtgcacaggggggacccagaagagggttgctgtttttacagttgaatgcaaaggcttttataggaaactgatgagagctgggcatcttatttgcatacggtgcaaatctgtggtagctccaccccgtcctcctagtgcacacgtaggcccttagcttgagttactccatattgctttgtttcccttactgtgcatgtgtcaggggacaaaatttttcattgtgggcatgtctgggaaactcacatgtgtagccctttttttttttttttatactttaagttctagggtacatgtgcacaacgtgcaggtttgttacgtatgtatacatgtgccatgttggtgtgctgcacccattaactcatcacttacattaggtatatctcctaatgctatccctcccccagccccccaccccacaacaggccctggtgtgtgatgttccccttcctgtgtccaagtgttctcattgttcagttcccacctatgagtgagaacacatggtgtttggttttctgtccttgcaatagtttgctgagaatgatggtttccagcttcatccatgtccctataaaagacatgaactcatcattttttatggctgcatagtattccatggtgtatatgtgccacattttcttaatccagtctatcatggatggacatttggcttggtctttgctattgtgaatagtgccacagtaaacatacgtgtgcatgtgcctttatagcagcatgatttataatccttggggtatatgtccagtaatgggttggctgggccaaatggtatttctagttctagatccttgaggaatcgccacactgacttccacaatggttgaactagtttacagtcccaccaacagtattaaagtgttcctatttctccacatcctctccagcacctgttgtttcctggctttttaatgatcgccattctaactggtgtgagatggtatctcattgtggttttgatttgcatttctctgatggccagtgatggtgagcattttttcatgtgtctgttggctgcgtaaatgtcttcttttgagaagtctctgttcatatccttcacccactttttgatggtgttgtttgatttttttcttgtaaatgtgtttaaattctttgtagatcctggatattagccctttgtcagatgggtagattgcaaaaattttctcccattctgtaggtcgcctgttccctctgatggtagtttattttgatgtgcagaagctctttagtttaaagacttcatgtctaaaacaccaaaagcaatggcaacaaaagccaaaattgacaaatggtatctaattaaactaaagaacaacgtttttattctgtatcatcaaggagggaacccagcacgcctctatccttttaagagacacggcaagcatcagacctgagggacatcatcatttccttgcagctcagaatgcacttaagtgtcatgtagtgggttttctgtttatgggtttgttttttttttagaaaatgtgttcttttctatcttttgtttgtttttgagacagggtctcgctgtgtcacccaggctggatggagtacagtggcaagatctcagctcactgcaacctcagcctcctgggtagctgagactacaggtgtgcaccaccacgcccagctaatttttgtattttttgtagagatggggtttagccactttgcccaggtttgtctcaaattcctggactcaagttgtccacctgccccagcctccaaagtgctgggattacaggtgtgtgccactgcgcccagcccaaccctgtcctttgtttcttacaatattcaacagtcagtcacttctagctttcactttgtcccataaaaatatttcattgaaaattgcaagccatggcagtttgcagtgtttctaagctgaggagttcagctccacacccaacagagctccagcttctggtttgattcttagagataggagtgacttttttcaatcatgtacatcataattaggaggaaggcattcagtcttgaacatggggacaaaaaagtgctggagatagtagcttgagagttgcaaatatttattttgattctgactttaattcttaaaaatgtttgtcaagaagacagtggtgtgatggagcaggtccttcggttaccacaagcacacaccctttctctgtagtcttatagcttgttttcttggtcgattgtgccagctcttataaaaatattatgctcccaggcaaagggccatttctgttggaattgttgagaagattcttggcttaactcttgatccaactctgatcagcttggccaagactagacttgacaagtttgctctgaattgcctcatgctgctgtgtggggtttcaaatcattggcttcccagtgctttctgggctagaccaacaaaacaatgcctgggaaaagagagatgataggccgtgataaaactaaaactgcgtaatactggaattaactgagttggccatgtagatggcaagatattaaaattgagtccttgtgtgccaaagtcgtaaactcattcagataggccctaggtctgtgaatgtttgttgttgaatcctaggctctgggtggaaccgaaagctgaaaaacatgaaattccccctctgtcctttggatcttattcagacagtcatttcctagctatttcaagttttgatcaaaacagacacgcagtagaagcccagtctaaaacatcggtagtttatatcacatatttacttccatgtgtcttaagtggttaagttgtagaattatgtcttttagagaatggatgaagaagtctaggagtacaataggcaagagaatatagcaaagtagttatattttgtcaattttaaagtaaattctgaatcattttaagtatattcagtaacacccgtttgcccccaccttccttcctttgaggttttcacttattcactcattaataattcatcagtctttgctgtttgtggcatgagtatgtacaaaaggcactgcggcgtccattgctgtgagtaatatagagatgtccaaaggtgtggctttacctgtggaaaccacaggaccatacccagagcatttggaggtgccatatgctgcttaagggtggcacatggaggggaggctgggctgcacgcatgctggtcctgaggtgaccctctggccgcaggagagctggaaaggtgccagccgtgggtgccatgcacttgtctgaggccaggatggggagaccacattccaggtacagggataagaggaggaaagtcccaggagtgggaaggcctgggggaaaaggggagaaggtcagggggaggcaagttggccagatcggctggagcttgggattcagccaggacagagcctgagccccaggccagactgcagggctgtgcccagcactggatgcagagtttggatctgattctgagtatgtggtgatgactcggggaggcttgtgagcaggatggtgacaaccaggcaggattttaggaaggtttgtctggttttggcaggttctctggatgtgactggagtgtgaagaggccagtttagaggctctggaggttgttcagaagtggcaacaaaagggaatggaaataagagatgttgcaaagcagaaaccaactgacatggagtgcgggagaacttgaaggcagcagtgggaactgggagctgttcccggcgtggggagaaggctgacgttgatgttgcctaaggagttagaggtgatgaccaggttccaggtggctgatctggataggcagctgcatggggcaggagccccagtgtggcacagctgtgtctgtcccctgccggtcctcagaaagtgacacctaacactgtcccagtccacacagagccttgtccagtagtcagggtgaggtgagtggaagcaagaagaggagctggcaacaggacttgggagaggcggagagcacagcaggcagctgggcccagacgtcagccccaggcagtgtcctgaagcagcgtgtgcacctgggcagtgcaggcatcgcgagtaagaagagggtgttagctcggataactggggctcctgagcagccttcaagaggacaggttccttggggctgtgggtttcaaataacatcatggaggagggagcagagaggcttgaaaataaacggcggtggccggggggagcacaaagaagccaggcctggcagtggcacaggtgtcaggggtttcatgaaggaggggcccgggagtgtgcctgccacatggacactggagcgaaggtgcaccctgaggcagcccacagtgaggaattcaaacgcagcttcctgggctggatcctgcagggcctgagttctctgttccaggggcatcttcatctgaggatttggggtgtccgtgccctctcctggttgaaagtgttagaagccacgttggagaggccaccactcaggtgctaaagttaaagctctagagtttggtgcctgccacttagctgcatggccttgggagttattcactcctctgcactttggttttctcgttaatcaaactggaatccagatactcacctcctaccttgttatgggaactagacgtgggcggtgcacgtgggggcaccgagcacagtgcccagcacccagtgggtgctcaggggatggcagctgccatgatttttgggactgaatgctttgataccacccaaatatatggtctgaggtggttgtaaatagaattagcagaggagatgatacagactcagagttgaattagggtttgaagaagggcttaggtctggagcgttacaggtgggaggaccagcagagagtggtcaggaatcaggaatgacaggacacacctggggagcctgagcggcggcttccaggcagggaagaaaagctcggggcagtatgagtccagaccaggggcctatcaggcgccttctatgcagggtcaggtggtaaagaattatctcagccttagtgggctagaagatctctgtcatagctattcagctccgttgctttctgagtaaacaaatgggcgtggctgtgttccaatgaaactttatttacaaaaacagatggtgggccagtttggtatgtggaggcatgttgactatggacaccttgaaaatcccatgtggcaacagatatgagccaagtggtgacgtggaatgccccatcgttgagggatggggacgcaagggcagcgaggaggtcctgtgggtccgggtgtggcgtgggcccagcgtggccatggcatctggggcctcagctgcagggttgcagtggaaggaaggggaaagaagctcagagtgcattctgagggtcaaactggcctgtaagtgacaaactgaggtcacttcacatgtacatggagggagacaggctgtctttggagcagtgtccatgcaagcctgcctggagggagctgccaccctcagctgcagccccagacctcgcggttgctctcatccgtcgttcccagtgtgggcagtgacgcagcaccacggtaagttctgtagagtggacgccactcgctggcaaagcccagcagggcaaggaataagtgtcactcagtctttatccagaaaaatccaccaatgtacttttagtgcagtattaacacatggtagaaaatggaattgcctagaggattttaatctctgatggattattcttgtacctgtacctgtctgatggtcgtgtaagtccatgttaacaaacctgggaccacaggaaaggagaactgatgcgaatacaaacaggtggaggatttccaggcgtcagtggggtctgggagacttttccaagaagtgttttcattgcagttaacatttttaaagatgaatatctcactattataaaggtcaatgccacttctgtaatattaatttgcaattgaaaggtattttcttttaagaagtcccctttttcaagtttctcaaactggaattttcttgagcatctaagaatcctttcctttcaaaagatccccaagttaccccggtctaagctaagaagggttcagcgttggccggaagcataactctagctctccaaggccttgggctgcggcagggtttgcatgtccaggcagtaggtggaggcttctcttggtcagtgtgtctgctcagggggaggcctggctggggaagcgggtagcagtttgggaccagagcttaaaagagaaggagagaccggtgcggtggctcaggcctataatcccagcactttgggaggatggggcaggtagatcacaaggtcgggagttcgagaccagactgaccaacatggtgaaaccccatctttactaaagatacaaaaattagcagggtgtggtggcgcacgcctataataccagctactcaggaggctgaggcaggagaatcacttgaacccgagaggtggaggttgcagtgagccgacatcatgccgctgcactgcagcgtgggcgacagagtgagattccatctaaaaagaaaaaaaaaaaaagtgagactttgaaagtgatgacagtttccacagttcccatgggcaggtggctcagaatgaggtggcctgaggcccacagtctgtccttggggactgggtggcccccacgtccaggcagcagggagaggacgtgctggctgccaagatggggtgggagaagcccagggcatcaagtgccacggaaataaagctggttgccttagttgaatggcgcctttgagttcccagaagctcttctcagcgggaggctccctgtctttcacctctgctcttctgaggtaccagttgaagggtttggggggtgaaatcaaggcatagggctcctggcaacactacccctggctccggggtttgcatgccggggcttcttccttgtcctggctgtcagagaacacctggaaataaatgctgcattgttttgctggaaaatcctgacaccacctcctgccttcccctgggagggctgagacctggcctaggcatggagcttacggtccacagacctgcctgcctgcagcatgacagcctcccagagggctgtattgatttttgaagaggaggaaaaaggcatacaaaattggacttgccagccttctttgagtagaaattggtgcttcctaaagggaatcttaattggctagcttcgaagctaaaatgttttctcccccttcccttctcagaactctccagcccccctgtttgttcttgtgagacttttccaagccccagttacttttctttcctgctttggaacataattggattcttcgctgggtagagttttgcttggaagacctgagggtgtagctgaaccaagtttgagcaccctggaaggaagacagaagatgccgggagaccagccagctcaaaggagaaagggagggggacagcatctgaactctggcctccagcatgatttcatcctttaaactgaaaaccctgagtttcagtgccagcgacgacacttgttgaaaaagtacaaatgttttctgcttcttgtaatctacttcttgcaaatattagtactctggaaaaaagatttattttaataatgtgagtttcagatttttttctgtagttaacgttgttttattactctatatccttgccagaaagcgtgttttaagagtttcaattcaaaattaaatatgacctcagtgttttaaaatacaattatattaactgtccatttaatagttgctgaggatttttttggccactgatggatagtcaagatacttgtctgagattaaatgcagtattctcaactctgctaaccagctaacttgttccagctgcagcaatcaacaggaaaaacaagggctttctatgaagtgagctggagaaagttgttcccggataaaattgcagtactattctataagctgtgcttttcttttaaaaactccactgtgtttcataatagggaactatctattatttatttagaactgtacaaaccaatttacaagacaggtaatttagtgacagaattatttattaatgagcccaagtatacaagttaatgggaccgagccccgtggaggtcaatcctcatataatccatgccttttggaaagaaaagtattgtcttcagaacatttagttatgattgttaaatttaaattacgatatattctcttgctaagacaaaaaataattttttctgaattgcatgatgacagagttagtctgtaagctgtgtggagatgaattgtgtcaattaggggtaggtacatcttagccctgttggtaccaaaagtattatttctcattgcatgggctcacaggagaaagcaagcctgttctttaatagagacgacaaatcagaaaccgctgcctgcctgggagatggaacagtcgtgcaggcgaggagctcagagggcgggcgtggcttcccaagctctggcacagcctgcaggccttatcaggtgctctgcttctggggtactcggcactttgctcttccggtggatgggggaggggcgggctgttccatgtgacagcatgtgggcttgtcatgattcggggtgaccactggcttccatttcccaggagtggctttgtcctcgcggtcttacggtatgtttccagtagatgagaaggcatgcctacagacagggcctgctggtgtctgctgtgtgtcatggggggaggcaaggttttcctcactgggacctcttcactccccctttattaatgaccccctggctcctccccagaggcccagaagcctagaggagaaatgagggtacagcatagatgccttagtgtaacgagtggggctgctggaactcaacagactatttacagttacagcatgaaggtggtgcttgaaggatttgctgcttcgtttcatttttctcatttcatctcatcatgaagtcgattgcattatatcagggggtggggaatggaacagacacagaggagaacccaccaagttctgtgtcttcaaacctgcagcatttccaggttccgactgcagagtcctatcaaagtaagcaaaattggaagtgatgcccatttcctgggctttcacaaactttgttattctgcagtctaccacaaaatctgaaaaggcagagaaatgtagctttcactgtttagaaaatctttgtgagtttttcttccccctagggaatggttttcagcacattattcattggaaaaatgaaatctgaaatgtaggtgtattttcagtgcacgtgctccggaggagcctcagcacccttgtgtcttgtctacccattcgctcagtgggcagggattgagcactgggaatgtgctgggtcggagccgagggctggaggcagagttgggaccagccccaggatggtgcctggctgtttgtcccagggctcactggaacagccctcctgggcagcccttggttggacttctttacgcagcccagtccacacctcacctgtgcattcgtcaagccattgagtgcagtgttgtggcctgaatcactccaggccttgctttggagggttgacagtaggggacacggcaggccgggggcattctgggacccaggtctcctgcctatgtggaatactgatgtgtgttgtgtggacaggtcactgatgtgtttaaatgtaaatctgaccttcctttaagagcaattgggcagcagtctgggagcttgagactgtatgatgtggacacctagtatctctttctggaagcttctagtgtataatagaaagtaggttggttactcattcccattgtctttgaataatggggcagtgggcctggattgttgtcctgtggattggggaagagatcatagagatcatagaagtaaccttagagtaaaagaaagtaaatcaaaatgctattctatgtagaatatatgccatcaagggcagagcatgtgggcgtgtggacttgtcatgatgaggagtgaccactggcttccatttcaaagaggagagctggagtgcttctattccacggagatgccccagactaaggtctttggagtcaggctttcattccattcctgggtctgtcccttatgcgtttggtaagttgttattacataacctccggacctcagtttcctgttttagaaatagagataatggtacctcccccaagggtctttgggaggaataaatagaacagcttataatggaatgcctggcacatgttaggcactcagtaaatagcagctgtgcagtgttgtgcgagagcttacatcgagctgttttcccagagtgcattgatcctcaaccgtgttcatgtacccctgcccaaggtgccatattgtgtaatggagatgtgacgtcgaggcgccatgttgcctggaacttctggagtcagccaccttgcctgtggctgaccttggctgtgttcctgagagagtgaggatgtgaaattgcatgacacaaagtcggtcatcttgtgcccgtctcatctactctcactggtggttcagttcttctctgcccctaaattcttacatcccagagcaggttcttggttgagacacaggtgcttgcctcaggtttccttggaaaactccagtggcaccaagcggtcagtagcctgtagcggccacttgcactgttgtccccttttgtggacgtggacgttgactctccatgtctggtctgtgcaggaaagagtgagtcctctctttctcactccagagcctgcaggggtacccaccctcagccgggcagggcaagccaggacagaggctttgagggcatctgaggaggaaactgcaaggtgtgcagtttggcccagcagagagagaccagaatgcagagggtactcagggcaggcggttgctactctgggctgtgtgcgtcatagcgtttgcatgacagacaccagcggttgaccagatgccccatttgaagcccatgtccaggcatgcagtgttgatctctgtgtatagatcgacgtggcttcttctctagggctggggaagagaactgtttaataatgcacagttgcctagcctcaaagatcctttgagaaatagctactctgtgcaagttttcaacaatttgtttagactaatggaatgactctttaaaagtttatatctttacagatatacaagcactttatttctaagcaactaatttaagctgggaaagaagaacgtgccctcatgtgtgtgtaaaacgttagaaagcagctctgttcactgccgtggtggtggaaggcatgtgcaacacagacataaggctatttgaactctttatttgccacatttacaatattaataatagcgtttctagaagttgtcacatcaagtaaaagatcttcattccaggctgtctttaggggccaaattgagactggatgcatgcatttaataaattgtagtctcacgtagtcatttttgtaaataattagtttcagtgaaagaataagttagcatattgtatgcatctaatgttgcaaatgtacatacagcaaactttgctattaatcaacagtcaggcaccgcaagtggggtctcatacataatgaattgtgcttaagcctcatgggcttcttgatagaaaaataaaagaaaacacaagtgcagtaagcttttgaataaaatttaactagattgctctgcatcctgtaattgttttggaatctttagggacctgatcattcatctatagttttggggtgtttttatcttcatctgtcaaatagtagagacttttaatgatatgttaaaatgttgataaaatacaattttccttttaatgatttgaacatttggaggggggaggtaaataggctttttaaggctttctgatctgccaagtatactatttgggttgtcttttaaaaatattttcattatttcctgtatttttaagaatcaattatttttaaaaagaaaaatatatatagtccttatggggaagagttgaaaatttacataaagtgttctctgtatttttggtgggtgttttaaaatactatggtaaatacctttgcagttttgtttaggatctgacattaatttgagccccagatattgagggcatagcgtgccggttaaaaatcggtatccagttttagcaagatacctacgaccacccagaaagtaacttggaacctaacttaattttaaatggcctctttctcctcttcacattattgacattagtacatgaacccgttggtggcctataataggatcataaacataggattcattttgggatggggttgaaggcataaaagcaaggagtgagatttatgtccacctttattatgaaccacacagtaaaagtgcagtaaagatctgctgacttgacagccagagctcctcacagccctcctgcaagcactcatggaacccgtccttctccaggaagacctcctgtttacttctgcgctaggaatgggctgtgctcatcacttacttccctgtcttatatgatgtccttttgtacagaatgcatctttaaaataggccctacaactaaacacataacagtcaatcagtagactcacctgtgataagtgggaggccctcttgtaccagaaagttttaaaaaaaaaatacattactcatacctgtcattgtttgttacgtaaacttaagcatatttttgatgttttgtgcgtgtttattcacttcttcctttcatagttgaacacatcttgttcttgaggttgcgttggaaatcagtagggtggcgcatgaatcactgagaacagcccacggtgtgtggtcagtgccatcgtcatcatcgtcatcagcaacggcagctcaagaccagcaaggccgcggttgtgtctgtcatgagcccgttggcatgccgtttgttttttatctttgccacagttgcactgttgagatccatgtttcctattactaacatcagcacttttaattttccgtttctactcagtttcctaaaagaactatagaatattcaaataattgcatgcgctttgtcaaacgtacatggtcatagtgcccaaacagttgctggccaccacgcagagccacggagcagtcactgccatgttccttcgcagcctcctcggggcctccatgaaacatcggggccaatggaaggcggaagtgctgtttctgatgttgacctgtgtgtttgaccctcaccttcccttcctgcgcagtcggctgtcaactccagaggaagggacagccctgagtcagtattctcaccactaaccgcatgcatttcagatcctcagtaaatgattgaatgaaattaagccactgcatttgtctgaaatacagagtcaaaaggttttattcagcctcctgtttaaaataaaatgatctttattaagagcaggtagcatagtttatttcttttcttcagtcttacccctgaaagaaaacatctgagctttagcaggaagttataattaaatgcaggacaaatccatcaaacacaagacactctgctagagatctctaaatgggacataattgtgcatttaccagtgatatttagcaagagtctccatgcagcgtggataatctttggctgaaggcatgttccttcctacatgagccccggagtctgctgctctgcccttcagtcccgaagcctctcctggccctccacaccaggttctggaagccagaggaggtggggtgctcactagctgggtttggaaaatgttgctcatcacctgagcatctgaagtgctgtgtgtggcgaggccactaaaagcttttcagatccccaccagtttccgtgcaacctccttcacagcctcatggaagccttgcgtccaagctcggcaccttgccagattccagaggaactcagaggagcacctgtctttggaacgaactctttccttgggtgaccctccagggtggtcaggtagcattcccagaccataagatgaaaacgtcgtccatggagagagagaggaggtgttcgggtcacaggagaggcagagggtacacagcactccccatctggagtgtcccacggtcagcccgatggtgcctcagatgtgagtaacttatgaaggactcttggccgattttcttaaatcaaacaggattcaagccaagtacatcgtgtgttaatgtctctggggagtagaattcattcagaaatggacatttagtgattctctactgccagtggaatcttaaggcacccaaaaatctgaatacccaaatctcccagctggctggtcaagttttagaatgttgagcactctaaactgggaagagcctggtagccgtggtaccaggaacactcactcttcctgcttgctgctttcctcatgctgagctgggctgagatcaagactcctggggcacttgcttcctctaccctttgtctgtggccaggtgggattcccacacagtcaaaggaagcccgtgtccaacaggggccatttcccttaaatttctctcatcacccccagctctgctgtgcctcaggtgggccgctgccactcttccttcacgttcttgataatatcagtgtcttgaaaggaagcttcttgcaggtagggaggacgcttttccctggaatagctgctgtgctcatatgagtttgtgctggaacattctaaccacctttctgtgccctggtttgggttgaagggaaggcgatttaaatcaaaataaatctgcaaggcagttcatcactgggacattgtttttccaagccggggaaggcgaatgggttagggcagcttcccacagacggcaactccgggagaatatcaccggggccttccagtctgccgcagccccgggagcttctacccagggcaggtcagtgttgtccggtttgattttaaggaacccctggcattgccaacagttgtgtttttcttaaagaaatccttgagccaggtccacatggctctagctttgctgtgttaaggtgcccgacgccctgttgtcacatgtacacacgcccagcaaagctgggctgcttcacccaccagccaccatcctctcgtgccaagtcaaagaaagtgaaagccaccagtgtcatgatatttgcctcgggattattctgtgggtgacacgtgatgtcctaggagaggcctaggggaggtgcgactctgatgggctctgagtgtttccccaccaatgctgggagagggtcttgtctcctgctgggttcaagggatgggataggaaggggctgaggtgccaggcaaaagtcttgtctcctgcagggtttgagggatgggacaggaaggggctgaggtaccaggtgagggtcttgtctcctgcactggctcctgctggcatcatgagctggcatccgtggcagcccccggagctgcaggatttgggcttccgagcaaaggtgctcccccggcaaggatggggcggaccacagggccggcatttcagtggtgggtgagttgcagggcccctggggaagactgggacgtggcatttccatgagcgtgggctacggagcccgtaattgttagtgtttcagggtttgccagtggggaagcttgaggaactcccccgtgataagcgccgccgtgagagaggccatcaccccagctcttcttccagggccgagcgcggcagggaaggaggagagggcagggcaggagaataaatttcattttactgtagaaatggaaatttgtgtcatggctttaaaaatctggttttatgtgtgtgtttaatgccattcattttaaatgtagtatcataaatcattgcttcagaatcaaagctgtttaattacatttcacccatgaatagttatctaatgccaatagagaaagagttaaaaaggagaactacagagtaaatcagaggttgagatcttcagcacaagcataaaaaatcaatttaagatgaattttactactataaaaattcttcaaatatccctttaagagtgggaactgctaggaaagccagctcacatttcaattccctcagcagcatgagagaaggacgcccgcgtgggcagaggcttggtgtgcaccccgttttgctcaggggtgatgaaggaatcctaactctggagtctgagcagttgctgggggcacagaacctcccagctctcgtggtagaatgccccctctcccacagtgtaccctcgcttccctgagaaaccccatctgcggggtgtgatggccagccagaccccgctagtcctgaagactaaccctgaccttgaggtgcatgcctcgccaaccaatcccacatcccagtcttacccggggaccgtacaactcacccaccactgaaacggcagcccctgtgctccactccatcctcgccgggggggcacctttgcttcggagcccaaatcctgcagccccaggtgccaccacggacgccagctcatgacaccagcagaggtagtgcaggagacaagaccctcacccagcgcctcagccccttcctgtcccatccctcgaaccctgaaggagatgtcagctgagctcttgctgcaggaggtgccaggcccaggtggcttgatcaggggttttgtttcctcagttgaaggtcggggcacatgggccccatcacgcttgctcttcctgtctgggcagtggtggttgacagcagccagctctgcatcactcaggagggagccggggctaaccctcactgcacagggcttccacccctctgttcggccgccttccccagggatcaggacagcaaagtacattacatatttctccatcgttcttcttagatagcatcagtacactgtttattcggttagcaaagagcagagcaagaattgaatgactgaaggtgtgtctctgaaattgaataatatttaagccaagcagaagttctcctttccgtggccagacctcactaacggggaaggaaattgggcagtgaaaagacagcactcccatgccctaaggaaactctgagagaggccacttcgttgcctgctcggcaggcccattctctgcctgcagagtgagcccggcttcccccagggcctctttgtgacgggaccgacaagggtttccaggcagtggcttgggctgtggagacctcagcctgtgtattaagggtactgggctgaatgagggcactgtctgcgtgagttcccttgggcagggatctgggtaaggcggcagtttggagaagaccggggcatgttctgtctggccgcagtgtccacggggtcagcgtaatttagccggctctgctgggcttggttcacaggtccgactgctggtcacagttatccgtggctgtcggtcatcctagtgagcttccttctttttcccttcattctctggctccttccttaaaaccgtcaggatttgtgtgcttggaaacctctgaccaccctcctgctccaccgtgaaaaacagtgtatgggggcccctatgtgcatctcacccaaaaaggtccatttttagaaagacccgaggatctcggcagagacttttacacccacaaaatgctccagcccagagacccagcctccagcacaggacagcgtgtgagactggcccgaggtcttccgtcgccgcccctgctgtcggatgacatgcacatttctgcacctgcaggacctcaaagcgaagtaaccctggacacacccttcactgggtctctttcccccacatctcccccaacaatggaaggcaagcaccgctccacacgaaaataacaacacgggtgcagttctgtgcctctccttagcttctccctgccgccccgtgggcttggtcatggtgtcaccacgcactgtagatgtcgcagacgcaggcccatggccgtgtgtgcccctgggcatgtctgctgtcttctggggaaatggaaacgccaccataggcatttactcaggcagaagctccagaactttagatcccagctttgccgtttttaattgtctcttgttaaaatgtgagtatcccagatggaatgcaaaagaggttcgtgctgctgaggccctggtttcttttctgaatggatgtgccagggtatttccgcccacagtacactttaagccaaagtaatttgtatcatctttaacacaaacccaaaacacgaaaggctgtgtttgtttaactagacgtgtaagctatagttatctttatttccgctttaactgcataagagaggaaacctttttaactataaggaaggtgttcggcttccttttatctcttgcctcattatgtacttttgactttattcagatttgtacaagcttggtttttacctcacaggaaaagcgagaactaatcgctccagagatcatctgagctctttgtgtgaaggtgttttaagaagttgtgactacatcttcttttctaaaacagcctccaattctgtgatacaaagtgaaatgccagttgtttgcagctccggggctgtggtcctcctggacaccagcggtagcaacaggccccatccacacagggctggggagacaggtccccttctgcacggggcccaggagacaggccctcattcatacaaggccagggagaccagcagaatcagcacggggccagggcaacagccccatccacacagggccgggcagacaggctgaatccgcacagagctggggttggagctgagagtcatccctgaccccagcttcatggtcctccagctcttccctgcaccattgccatgttcttactgctgcagccctgcgtcagggcagctgcggtgccttctgcctcttgccaggggcccccagcccccaccagtcacactgtgggccgcactcataggacaaagtgcccttcccgccctgacacgcacagtccttgcccacctttctgtgagtctcagtccccgaggcctccactctgcgtctacgttcacactgtctgtcctacgtccgggatggctctgttgcctcctctccatggactggccgtgcataccttgtgtggacagagttgggacggtgctcccggctgcatcggccgcctgtgctgggccacatgtccaggcaagtgaagccttcactgggaccctcccagagcagcatgggtgtgtcgaggagaaacattctgtagatctcagcgcacgccccccaaggcagcccaggaaggaagggtgaagggcccgcgggagctgtgcgtccacagcatccacagtgcagtgacgtttcccaccttttcacagaagcctgaggagcagcactgtctgcagaaggaaactagaaaacttccgtgctccaagcctgggaagtcccggggaagcatgccgtttgtctggggcctcgagaggcagggaaggaaggaagggagtcacctgaagaaatcggacccagggccagggcttcccacgggggtccacagcacttgaaatcacaacgggatgtgtcatgcactccacagccccaggtggcagcgggagacctccccttcagggccatgtcctcagtccgtggaacacagccccagaaaatccacccctgctggagatggggaatcctttccatgagggcccaccaggtcgaagccacagatgaatgaacaccccaaacagaagcagccacaaaacagtctgaagcgactcccagaggtacaggttcaaactgcaggaaatcaaagggaggagagtgtccagaaagaaccaagagggccgcgcagtagctcacacctttaatcccagcagtttggggggcccacgcgggcggatcacctgaggtcaggagttcgagaccagcctggccaacgtgatgaagccaacatggagaaaccccatctctactaaagatacaaaaagttagctggccgtggtggcagtcgcctgtaatcccagctactagggaagatgaggcagaagaatcacttgaacccgggatatggaggttgcagtgagccaagatcgagccattgtactccagccacggcaacaagagcaaaactccgtctcaaaacaaacaaacaaacaccaggaaggtttgagaaagaaccaagtagacacaggcacacgaggcacagggctgcccccgagaggacagactcaccgatgaaggaaacacagagtaggccctctggagcgtgggaatcaggggactgcaggtaaaccctgaggaatcccctgaacacagcacacggccatggaggaggcagaacgcgtggatgtggccttgcgttgttggactcggggtggggtgggccgtgtggtgcagtctaatgactgtgtcgatatttctgggaactgttttcaatagtgagtgcttgatgatttaggtgcagccgtgccatctgtaagtcttacaaagggacactgtcacttgggttgccttgcgctgtgatgcagactctcagaacacacgtcctgggaggcctgaaggtggagagtggttgcggggcctcggtgcgtccttgcctcaccagtccccctttctgctgcacagctagttgagacgtgtgtgcccatgaagcagccacaggtgtttgcccgtttagatgcagtaggtgtttgcttttccgatgtgtggaggcagggcccagaggtttactaagcccctgttctcacttttgcagtgccgtggaggtcccagcccccgctgcggttctcggaggtccggagcccctgatgcagtgcacagcctggctgaatgcctatttccaccagcccgaggctatcgaagagttccccgtgccggctcttcaccatcccgttttccagcaaggtcggtaactaagccatctgcggtgtttcctttggggagcttgacttattaacgatcgctgacatcacagttcattttattgagtataccaacttggtatttttacatcagctaaacagaggcagcgtttggccgagctggagggacgggggttcgccgcctccacccactccaacacttgtgttagttttggcacagggttgcataattcttggcaaaggcaataaaaatgaagcatgcagatcgactcttgactctcgctggctgaaaggtttaaataggaacacatctgaatggcagtaaatttttcaataagcttattgtgaacttcaactatctgcttgccaacagcacagaaaacgagacttgtgcgtggacatttagctatttccatacactctgttggtgacacttacatcatagcaggtagcagcattggagcttctcaaataattttacatttaatttctcaaacgtaccagagttagacatattctttcttaagagatgacttgagaacttacctgtatgtagcctgcttaaggcttgtgataatctaaaacatttcccagacatttcttttaaagcttgtgtttggctctgctcaatacagaaattaattacagcaactaaaatcattccagacacatgccagaaatttattttgcatagtgagtttttcataatcatttttgtgtataaatgaacatatattcatatatgatgtatatatggagttgtacacttatatatccttaaagggaaaaattaccttgagattttagatgtggtgaatttaaagcaattttgaatttcagatcagatttgctgggtaagcttaacagtattctaattgctgcggtgcttctcagcacaaaacaaacttgaaaatggagagaacttttcaagggaagcaggtaaagaaacccctgaaggttgggctaatacctgagttcactaaccaagtcagacaggcgaacatatgaagtcatgagcacgttttgtgcataatgaactgaagctgtgcagctataatgaaccaggcaccttgctgtcctctgaatcatacagaactgtctccagaagggttcagtggggatctctaggatgggcagataggaagctagagtgggtgggcctttacatggaaccacaaacgtccaagaaacctctcatcatctctgcccaccaatgggctgctgccaggacaaaggcactaccaaagcctcctgggctgccgccagctgggggccacctctccccagcgccacaagccagtgagccaattagacggtgtgggggaccttgctcactgtgcacctgatgggccgggcacagggcaggatgttgctgaatggcccaaggaagtcagagattggttttgtttattaaagttggggcttggggatcttagagtggtgaactcttctctatacgatctctttttgggggttcgcctgccaggaggagcaaggctgaagagctgtccagaggcttttcttctccttaagcctgtgaaatatgtgagctgaaatgtaaggtctcaggacagaaaagttctcttacaaaaccagggcaggaggtatctgcataatcatatggaggctgggagaatgagcctgcaaacccctgaagtttacctaaggtttgttgggcaacttcatgaaaaacataggggcaaaagttccatgaaaatcgttagttttctccaagtcatatggtggccctggccatggagctagaccctgctggcctggtctcaccagggtccagagagtggtgtgctctcaggcaggccaggaagaaccggaggaggaggcctccgcagctgctgacaggagctccagggcaggagtggccagcaaggaaggtggcaccggaaataatcagacactctccaaaccacccctgcaagcactgaacccccgctgagccttttccccctcacttctgcccatggcagtgtttgctgctcctagagccgaggacaggcgggcccctggggcttctcagtcaagtccctagtgcttaagcagagttgggattggccacacctacccctgcctccctggctttcagcccacgccaggccaggctgcttcctgggctggcaggtcatgataggtcttggtgaccaggaagacctcagagtagccgccaggatactggtaaaggctgtctggctcccccgtggccctgcccctcttggaaagccctacagtgcgggtggatacctctagctgggacgaggtccactccagccaagttttgggatggtagtgcgacagccgctcacatccttctctcttggtgttctagaactctgaggctggctgcagacccagggtgctgagctcagggccttctctcgagggtaggggctggagtcccctgggccaggcctgcctgcggatggttagtggttgctgtgggggctgggattccccaccacagcatgtgtaagccaggtttttaacatttagctcaatcgtttactcctgggcaggggccaggtgtatggattttactgtttgaagaaggggaggtggatggtggatggttgctaacagggagttaattggttctcccagatgtggatacgcccctctctgtctggcatgagtttggtttgctctctgtccaggttgttatcttgtaacatcagtgaaatcaacagtgagggggcaggtcttctagaggaaaagtcttttgacatctcagagccgcctggaagctgtggagtaacagaaatcaacctgctttgcagactgagaggagcgggtccattgtaacatggaatgaacatttccttgaccaattcctttttctgcacattttaatttctgtatatgtttaacatacttttgcatatcatttttcaccatagtctcacttctgagattgagaccaggtttatctatttcaacctggtttgtctatgtcaacatttttaaaaatgtgattgtatttgagctcatccttgagttccagcacattgaccatttctttctgaaggcctggctggtaaaacttctgactgcgcagtaccaagccctcatcccttcctcaggcctgtcctgctgctgaaagaccctctctcctgcacacggcctcttcgcggtaccacctcaccttccaggattcctctctggaacgaacatgctgtttgtgatttgctttttaaggctaaccacaaaaatatgcattacgttgaaccatatgaaattgctattttttaggttaaaacttatcaaataccagaaatttcagatggttcaacttcttatcttggggaatttccaaagacaggttagtagctaggtagctgttgaagtatttctgccaagggacagtgaagctgcctttcccgaccgggtgtccggaggtccccggggctgcctcattgtgaggttgggacaggtgggatttcccagtgggagggcgctgaggctctggaaggaagcctcattgttctgctgaagggattaagaggaaagctgagctgtccagtgaagcatattctaatttctcgttcaagtgttgttttagtcaggtcatttcctaaaataaaattagtcaaagttttcttggtttggggttttttggcttttttggtttgctattctggtttttttaaagtgtcaacaaaatccattttctagctactgtgtgaccgagggctagcatcttgtcgtacaacgtagctttttaaggaggtaattttttcccataagcctctcgcaagggtcagctttgtatttatttctaattcatttttcctcaagaaatacttatttaatgaagccattatttttgaaatacatttttacttttttcttttataatgaaatatcatttaaactttgaacactccctgatttcttagtgtttatttatgaaaatgtttagcttctttatataatgtgccttctggagaagctgtaggggtcagcagccaatgcagctacaagaaatcctttctaccttagtttgccaaaagcagctttttacaatgagttcaagaaaagcagacctacggaaagcgaggatggactttcagatacagaacccatctgggcacgtcctcaggtccctgagccctcccacccatggaaaccctgccagcaggtatggctgaccccaggctgctgagggaggtcctgccaaggcaggaccaggccttggggctgcccacgcgagactgtggggagcctagctgggaccccagccttctcacagttgaaggtgttcaacggacgagttctgagttttctttgtaaagtgactgcaatgttcccttttaaatgaaatatttaacactttaataattccttcgtcacagctattggcttacagctatgaaatccagttgcatgacagcagtaaaatctcccttttttaacacctgctggtagaagtaagtttttgtaacttctattatagagcctcagaaaggattcatatttttgtatttttgtgtctccatcgaattcctcatttcaaaagcgcctctaacaaaagccctgccccagagttaagggaaagggccttcagggtgaattcgttaaggttcccaccgtgtcctggaagatgggccctctttgctggtgcttctagtgaggactgcttgggtcctggaaggggcatgtcccgggagaggatgacgagggaggagaggagaagagagtggcgtcattacttgggtcctcaccggagccagccctttaagattagaaatccttcttgaagagccaagcaaaggctcatccagccccctacaaccccatcctgctgcctactcacatccaggaaagagcccacccctgatgggtgcccaagtagatggcctcccctggaaagaggcatattagccctcctcacccgagggtcctagggcccgtttgggtgttcttaaaatgtgccttataagtcgtgatccagcctgagtttttctacagagacactgcagccaagaggggatgtttttcttgtagcttccacatagatcacggcagcacgcaggctttgtcctttcagcactttgtaccgatattttccctgaacttaagaaaaaaattaccaattgaaagagaagagaatagctaaaataggagatgcatttgccaccacgtgtgggtggccaccgctgttccccttgattttaaacgagggctcataaatattgttgaccttgctgagatattacctggtggagctggaaggtttgtaaaccttcttccgatgcccgtttattgattagaacaagctaacaacactgcacttaagtggaaaaaacagctggtaaaaatgtaattctttcagccttagggctgctgtgctccttttctggagagcaaatgtggaaatcaagatctgtggccttctggaaccttcaccaggaaaggtgaaaagaagaagaacccatccacagctgagagtggatggcaggcccgcgggtttccaggtggccagtaggattgtccgatgtctggaatgagtaccggggccgccaccaggaacacttgtcatttctaccatggagaggaaagcccagtgcatttctgtggttcagaaacttgacacaaagagaaaagctggaatgtttaaaagcaaaaatagggcagagatcagtgaaagtgcaggatgtgtgtgaaacaagggtagagtgagcactggtggggatggaggtggtgaggggtcttctgagctggggacgtttacttacaccagccctgcctcccaagaacccatcccctgtgggtccagaagaccagatccccgccaatgtccttccctttcagagctgtctggaggagcatgccactagttcccagggtctcatctgccggcacacggcctgactttcatgggaagtccccattgatgctgttcccttcccagtgagtgggctcccgtcacccgtcctggctcatttgaatacctgcatcacctccagcccctcagcagaacaagaatgtcagataatccagaatgctgttgagagctgctccaggttgggggctcgcagccccagcatccaaaagcctggtttcagcagggcatgcccgcagagcccctaggcgccccgagctctcctggtttgcccgggctttgcctgcacgggctggccccgtggactgcctggccaggccagcccagtaacagcgaagcacaccactctcagctcctgagcttggctgaccagctatactctggcatattggtgaatttcatgggccaaagaacctgaggttcagattgtgtcttagttcattgtttcatatttgaatatgcagtttcctacctagcaattgtcatgagtactttcttgctgtttatactatgaacaacatcttgggctaggagagagtttttaaagtttcaacaatgattcattcaagcactttcctttttcaagttactcatatctcagttcattcaatggggttgggggatttatatcagaatcctctagacatttcatttataatattctacctataaatttttatacttcttacccctcctcaagatacactaaaaccttagcatgggcacacgcacacacataccctgtttctgagaattattgttctaaaggaatttatcaaaatggatgtagctcctatgaatgcttttgctgtgtgctttaccctctactaagcctaacattcctaatttaatagctatttttgtttgagacttaaaaactgtgcgcattgaaggaatgttttgccgttgaggaaatgccagcccctctcctaggaaaggggtgctcggctcctggtccactggcagtggctggaacagaaccacagcctgctgaatcccaggaaattcatgatgtccctgtgcagagccctctgactaatcagcgatcccacaatgcctgtagcagaagcatagttaggtgagagttttatcctgaatgtaagaggtggccaggtccttagttccctgaggttccgtgagtcgggggtaaaggaagcagccctcacacagagtaatttaccaagcctgagagggaaccaagaggactgtttgagagtcagccacttccaaaccttggtggacataacgagggtctctactacaataagcaggacttgtaatatgtaaaattattatgagtgctgcttttatgggaaaatattcacattaaaatataatttaactctggtgaagtaattaaacagtaaatcagtgatggcttctattaaaaattaagtcatcgtaattatgtgaatgcctttagaaggattttccgcagtgtcctggcgttggccttgagtggacttctcaaaaagtagaagtaaccaggtttctgcctgtgaggaaatgtaaattgcatcattgcttcctttaataaattttcattttaaatgggctttgaaaaataggaattttctctctgttttaaagtaaaaaacacacttttcacttaaatatgtttctaaatttctatttccactgtagtcattagctggacatgtgccgctccaaaagagaatgttaaccttcgtctcttttgtcgtcataaatgcacattcatgttttacaggtaatgttcgtgcatttgaaataattccagcaataataagtagaattatctccactacctgtgtttatagagaaaatgatgttttaataacgtgtgcatagaattggactatgttatcaatacgttaaatgtgtaaatattagtataaaattaatagtgataatgctgaaaaactattgcaggagctgaaagtgtaagaactatgacttaatgtaaatgctttcacacatacggtttttgcctgcaatccttatgttcaggctgactcggaatataagattcatgagtctctgtccctctttatatgttgtttcatgtgtcagaatggaaaaagcaaatatttacgtagagggaactcctccctcctgttggaggtacgcggcggtcagtgtagcttctgaggccgcgtggagatgggaacatcctcaagacagagcagacttcctggaggctcagccggaacgtctccagctctgtagcacgttttaattccatacaagaagttactcccaaagaagtaaattgaagaacgaaatcgaggaaaagaaagtccttttttgaaagctcttaaacacttgactccgtttagttcggatcaggccttctctgcccttccaaagattcaggttaggtattggtaacgcccaggaagcacccactctggcgagcccaccctctccgccagtaaatatatacagtgtagctgttactatgacaacgacttttttttcttgagtactgtttttaattgttgcacaaacacatattgtgtaagaaaggggaattgtccatagtcttccacgtgtggatgtgtgtgcccacactgtctgctttctttaaaaatgcacattcctttctggattgggctccgcgatcccccgcctgccaagcaacctgattttctcttcagcctttcctcacttagatggttttagtaagacctagcaaccgagctcaagagacacgtcaggacttactgcttgcccaagacatatacttttcatagaaaattcgcgtctcttcctcttttcagaataaaatatgcaagaaccaacagaaatggcacattcccctgcttttccccaagaattgggcctttgatgttcaagagcagctgatattaaaggctatccctagaaggctgtagaaactgtacctatttatgacaaatgtaaaacagcacaaatctagctgaatgtgatggtatcattagtttgtgaatcgcatccttgaaaataactgtgaaggagccaaatcggtttaaaagaagataacaaaatggtttaagctacttaggttgaatgccaattatattttaatattcaactgagcatattttactaagaaaaaaggccgcattgacgcatgcataactcattggcagcgtcggccagctgtgccgctccactctccgaatcactttgtgcattttagtagcatggtaatttagtagaggactacctgagtgatggcattttcaatgagcaggtaatctacagagaatttttatatggttatgagttctgtgcttcagcccggcaacacaaaaatacatcaagaccaattacggtatcaactttcagtgtgatacccttgccacgcaagtgcatgtatttctgccccaggcatttcaaattgcatctaatttgaaatctttggggttttaattaaatttcagaatatatggaattcttcattagtacctgctctgaatagcagatcatccttctcccagtctctcgttaaagaagtaggctgtggtaaatagcgtgttcagtagctgatcatttgtgggacctgggtattggaacagaaatagtgaaatgcaaaataatatcaaaaagattattagtccagggagagtctcttgatttgtattttaatggaattttacatttctcttaatgatttgcaaattgtcctctgattataagatgcattaagcttttcattttaatggcaaagacacagccattagcagaatttttttttctgtcttctttttagagtgcttccctgcagcagataaatattgaaaccattaacaccttttgatgtatggtacagtctgcatcttagacccacacatggctggccggctgtggtccctccgtgccgcacacctggccggggaccctgactcttctctgaggacagtgagcagcagtaatgcctgtttccttttctggaaaacaggattctttttgaaaatttcatcagaaggtggtgtttatttgtattaaagcaatgcatttaaatattattcatggcccaatgtgtatttaaaaagctggtcttaccagtgttagggttgacggtgcccacagctcctgccttgctctggtctgcggggctggccttggtgattttggaaatggaatctggccttgcccccaggatgtttctctgtcaacccatgtgctgtgagagacacacagagctctttctgtgttagccagctgaccacagcacgaccccaacgtggggacacttgactttggtttggcctctgagataatgtcttggttttaaggccaggacttctaatgccctagaagatgaatatgatttacacgaccagagctacaaggcaaagctcatctcttctgcttcatctgctgaatgtgcacagggagctttaggcttcgacctggcatgcagtgacagtctgtgaaggcagtggcgcttcgggctaggtgtctccttgtgtcggagacctgtggaatccagcagctccgtctgatcgtatagttaggaaaaccaaggggactagagaatggcactgctgagtgcgggcagtggtggctgccccccacccccaccctgggcaagtgaggtcaggcctggccctgcttgccctccatttcgaagggcaattcttcactccaggcttgcacagctgacccgagagtgagtgtctctgagcagctgtggctctcagtcacttaccccctcaccttctcacttctcttcatgggtcttccaggatctgagggatgaagccagacacacctcctgcccttcctttgtcctctcctggtgagtgtcaccttcccgggctgtcaagagctggaccatgtgcccactcaggtgtgtcaccttcctgggctgtctagagccagtctgcatgcctgctaaggcgtgtcaccttccgctcaggtgtgtcacctttctgagatgtctagagccagtccacgtgcctgctcaggcacatcaccttcctaggctgtctagaggcagtctgtatgcttgctcaggcatgtcaccttctgctcaggcatgtcaccttcccgggatgtctagagctagttcgtttgcccgctcaggtgcatcaccttccgctcaggtgtgtcccctttctgagatgtctagagccggtccatgtgcccgctcaggtatgtcaccttcctgagatgtctagagccggtccgtctgcctgctcaggcgtgtcaccgtcccaggctgtccagagccgatctgtgtgcccattcagctgtgtcaccttctgctcaggcatgtcaccttcccgaggtgcccagagctggtctgtgtgcccgctcaggcgtgtcaccttctgctcaggcatgtcaccttcccgggctgtctagagctggtccgtgtgtccactcaggtacgtcaccttcccaggctgtctagagccagtccgtgtgcctgctcagatatactgtcaccatgtgggccctactcttgtgtcagggccattagctggcacatgctgtgtggttgcctggtgcgcgctggggcaacctcgggaaacactcttagcctttgtattgatctgtgcaggctgccaaaacaaagtgatgccaactggggtcttatacaacagaaatctttctcagctctggagcctggaagtccgagaccgaggtgcggcagggtgtcagctactcagaccaaggtgctgaggctgtcctgcttgccctgcagatggccgtctccttgctgcgtcctcactaggcctttcctctgggcgtgcatcgctcgggtctctatatcataatctccccttcttagaaggacaccagtcagatgggattagggctacctgaacaaccgaatgagaacttcttcacctcttaaagaccccatctgctgatacagttgaaatgccgagggtcagggctgcaacatacgaattttggcagaacatagtttagcccataacaccctttccgagcctctgattatctgtctgtaaagtggggacagtagtaacaatgtgtaaaatgtcatgagggtaaaatgaggccaccaaacagtcagcaaaagaaatacctgcttatttcacagatagtcttttctccaaaatcccagtggtagttagcaagtcaggacagctgactccacctggtcctttggaactcagggaagattgggccgttattaggaagtgctgctctttgcagccaacagaacttcccaaggacgcccgccctccgcccttgcttgctatgtgtacgagttacaggaagtgtggctggtatagccccgcagctgttcagaaggagtgttttggtttgtcatctccacatgaaatgaatggagccaattcatactgtaactgagaaaagaacatttttcaaccattatttcttctccctactcactgttaagctctaggccacaataaatggctgcctgctgggactcctgcactctgggatgacacgttcaaagcgtgtgcccatgtaggctgctgcaagagggtaagcatgattggagtggggtcactggggtctggggagccagcctcggcccctcctggctcagcacagccctcgcggccttgggggcccacagggtcactctcccccaaccctcccacagcaccgggctgtctgctctgtgcttcactctgcactagctggttcctgagtaccaggaggcattctctgatatgctatggatacagttatggacaaaatggactcttaggaaggcagcaagtaaggggaatggaggggcaaagagcacacagctaaagattgcctgactcaactgtggtagtcactggtgcactgcaggttggcatttgcaccctgctagcatgtgctcctgaaactggggccggagagctttcttctctgtctgagcactcagagcagtgcctgccaatgctgtgacaatgaacgaatgaataagcaaaatgtcaacccattttcagagttttgtttaatgtccctggacctggatctctcttgagagtgagcattgaatgggccttccctgcccctactgagagctcagggcatggaccccaaacgcttgggtctctcctcttccctcttctgttgtaaatttaaatgtcagggggaaaaaaaaaaaagcaagaaaaatatgtaaataaatacatttgcaatcatatgttatcggatgagaagggtagcggtttcaagagttacattcagagtaatcgttgagcacattgatggcaagttgatagtttcgttattatgaaatatttactttggacaaaggagtattcaaaactgacttacgaggtataaataataaaggacaaagtcatatatatgccacccaggtgatgtaataatttgttttcttcccttctgtcagtagacatttgggttctgaagtttttgcctttaaaactaatgatgttacagatattctaggttgtgtgccctagtgctccagctggctggaattcatgggcggagttcgcgagaagagggaactatacagagaaagaattccagaggtctgcatggtatcccattgagtctgttgcagattacaaagtcatacatgcatttgtaaaccacatgaaaccagacaactattggggaactataagttgaacaaatttcagataagtgaacctcactagaactagaaaatatgtggacaagtatgaaaattttcttctattattttatttaaaagatgattaactgttcatgataaagttaataaagatgtattttgtagtttataatacacgtagaaggaaaacatatgacaacaatagcatagaagatgagactggggaaatggaaatacattgttctaagtttcttactttatgaacaagtataatatttaagggcagactttgataaattatgaatgcatattaaaaatcctagaataccagtaaaaataaccagaatctatagctcatgggccaacagaaaagataaaatagaatgctaattcttttattagaattagcatattagaatgctaaaatgtaaaagaagatagggtaaagggggaacaaagaacagatgggaaaaataacaagttggcagacttaaacccaatcatattaataattacattaaatgtaaatgttttaagattcaaataaaaagacatagattagtagactggtttaaaaagccagagcctgttatatattttctactagacaaaaataatgtaaaatgatgacagagtcctatgtaaagatggaaggaaaaaaaaaggaatacattgacagaaagatataagtaaaattgtatttattttcagatcacataattatttacatagaatatcttgaataatgttgaaaataactattaaaaccaataagtgaatttgagaagtttgaggatacaattttaacataaaatgtattctatttttatataatgtaattaaaaagtaaattataaaacagttgctttatgtatttaacattagcattattaaagattattatttaaagatatgcaaggcctctctactaaacagcataaaaacatgactgaaagaaattaaagaagacctaagtaaatggatctttattagttattggaagaggcggtgttacggagaggtcacatctacacaaattgccctctgcattcagttcagtcacacttttaaattatttcaaaatgcaaagagcctagaatatttaaaacaatcttgaaaaagaagaatgaatttgtaggacttacattacctggtttcaagacttcctacaaatctgtggtaatcaagacactgcagtaaggatcaaaacttagaacagtgcaacagagagagagaccagtgttttttcagttcttgtatctttgagaaagacacaaagtagatcaatgaggaaagtaaagtcttgttggccaggcatggtggcttacgcctgtaaccccagcactttgtgaggccatggcaggcggatcacttgaggccaggagttcaagaccagccttgcaaacatagcaagaccctgtctctactaaaaacacaaaaaacagccaagcatggtggtgcacacctgtaatcccagctactcgggaggctaaggcatatgaatcacttgaacccaggagacagaggttgcagtgagctgagatcatgccactgcattccagtttgggtgacagaggaagactctatcacaaaaaaaaaaaaaaaaaaaaaaaaaagtcttgtcaactaatggtgctgagcaactggatatccatttttttttccattccattttcagatcactttaatggttagaaatttgttccataacttatttatttccataggtttttggggaacagatggtatttggttacatgagtaagttctttagtggtggtttgtgagattttgtgcacccattacacgagcagtatacactgaacgtgatatgtagtctttcatccctcacccacttcccaaccattccccctgagtccccaaagtctattgtgtcattcttatgtctttacctcctcatagcttagctcccgtggataaccattttcagataaatattattcaccatgaccttgacctcacaccatacacaaaaattaatctgaactatatcatatacctaaaggagaagctgaaactctaaagctcttagaagaaaacatgagtatttttctgatttgggtaggcacacatttcttataacaccaaaataaaaaacaatgaaagaaattattaataaattaaactttattaaaagacttcattaagtaaatgaggaacaggccacagaatgagagaaatttttacaaaacacatatctgacaaaggacttctaagaagggtatatgaagactctgataactccataaaaggaccaacaacccagtaaataactggacaaaatatctcacattttcatcgcaaagacacataatacacagattggcccctgagctcatgagaaagtgctcggcatcatcagtcattagggaagtacaggttaaaaccacagtgaaagacatctgcatatatcccagggcagctcagatcagacaccaccaagtgtcgcagagactgccgcagcctcgcctctcgtatacattggtgggtgttaaaatgttgtaacctctttgcaaaaggtctagcagctgcttataaaactaagtgttctcctaccccgctacccaacaattccactctagggcatttatccaggagaaattaaaacctacgtccacaaaaacgtattcaagagtgttcacagcagctttgcttgctttatttataattgctgcaattgggaattgcttgtatgtccatctgtaggaaagtggataaattacctgagggatatccatgtagagcctgttcctatctgtgaacttagcattgaaaaggaataatccacagacacacacagcctcgtggatgagtctcggtaacgtcatgctgagcttaaggagccggacacagcaagagcctgcctctgattatatttattgaagctctgcagttgccaaaaacaatctggatagggaaaagttagaagaggaactgcttctggggttgtgcaggcagtgagaaactgggaaggggcatgagggaatgttctagaccatgacggccatggtctatatcttaacaggttaggtcacataggtatctatctgtgtttgtcagaattcatcaaatgatgttgaagatggtacatttcactgtgtgtgtaaattccaccttaaaggaaaaaagaaccataaatggacattgaactcttaatggtatatgtgctgaaggacttggagagagtacactgatgtctgcagcttattttgaaatgcagcaaaaataataataaaatggatatggggtggagagatggatagatatatgataaaaacaaatacaggctaaaatgtcaattatatcatctgaggtataaagctattcattgtaaaactcttccaactctatgtggctggggtttttcataatatgttggaggaaaatagtaaatattatggatttttattccttgaaagcaaatttgggggaaagatcatgaaaactgtggcctccttatcccagatggtgaagatacaacctagtatggcctcagcgagatactgagtgcactctcagtttgcacctggagggcagggtgagtctgggaggtctgtgaattgtcagtggacctcccggtcctctccagagccctgcaggatcgggtggatacactgacctgatggacaggaagaggaagcctctgggccagacctttggacactgttgccttactcttcttctctccagccaagcgagtggccttgggaggtgagtgtggtgtcgccttgcagccttgcactcagctttgcagccgtccctgtccagccagcttccacgcaagtggaagacacacagaatccacagcccaggcagctgctctcacctgtgtgtggagcacagggtgcccatcctcagagaccctgcccagcccctcgctgccatcccctctgctagaccaggcatgtgggtcagcgctgccctgtctggcccgaagttccatgtcagtagccgtggatcaaatgatgaaggcagagttatctaattacggagtgttttctctaatatttccacagcctgctgctgtcatggaacatggagattcattacttagaatgtcaaattaatagcgttcctggacctgaaacatcattgtgtcaacttctccaccttttccaggtggtggtttgagtttgtgcacatggcatgcctattgccccagcacggccacagctttccaaagtgccgcccagggctggggtctgcccacttcctcggaggtctgtccatgctctgggcaggctacagcctgcaggatgcagatgcccagattggagcagcaccctgtgccctcaagaggagcacagctcacacatccacgtaactcttgtccttagcagtagtgaggggcttctgcaggcagaggagtcggctccacggtcctccatgtaaactaccgggatcaggagcctagggttcaattctgctgtcacgtgtctgcactgtagcctgttctgccttctcaaccagccccttctagctcctggggcagtttctctttagctgaaacttcccttcatcttccaccaataccatgttgcgttacagtttccctcttctcacagaacgagccttgggagaggagtgtgttctgtcacacagcctggccatggctcaggtccacaaggtcagctccagactctcagtgcaatgagggaccatgagtagcttctgcttgctgagtgctttccaagtggcggggcctctgccaagtgctttgtgatcctcatatccaagtggaggaaactcaactttagacagtgactgagctccaacagctgatccttggcacagatgagacttgaacctgggtccttctgactccagaatgcaagctcataggaaggggtaaatttactgggaagatctctgctggccaggtccttgatggcacagggccacgtgcaggtggagtccaggcgagacttgtccttgggaacacgagctggttttgaagctactgtagtcctgggttgcccgcccatgggtgttgtgaggacgctctccagcatcactgctgcccacgtgccctgaggggtcttaggttccaccccaggtcacattcagtgttttgtctgattcttcaccagaagggagcagcctcacgcagactgagcaggaacagtggcattggtgttttccacagatcttttggaagaatttgaacttctgatcatgtatatatgacactttttaaagttttaagtgatgcatggaaacttgatattgtaaatttaaatatcagtcattttcagttttgtctctttgctgctcaaaatgaaaaatcttctcactcttcccctactccataatatggtcatggagttttgacctaattaaaagcatcagaattaagttgctaagtttgaatgggaatgtagtggtgtttaaggggacttaggagaccctgtcctcatgtcctttctgtcactataggttttgttactgtttaaagtccatctgcccagcttttagataattaattctaattttgagaacttgggagatgttgcaaaaactgttggagctgattttaagattggtgtaatatacctggtattactagagtcagtcagtgaagtcatagatgaagttgtgacatttggcccagggttccctgctgaattctgaaataccatgatgctatcaagagaagagccatgggttagccagtctccatgtgacacccagtgagcttcactgctggtactcccactcttgttccttctcggatggagtcaggtctggccccaagctacagcaggatatggaggaagtgatggtgtgcgacttccgaggctaggtcataagaggccttgcagctcccagtgtcctcagtcacctgctgtgagggcagccagtaccatgtcagaggacatacaggcagccccaggagaggcccatgtggtgaggagccagggaagtcagccctgttggaaatagatcctccagccccagtcgagccttcggatgagtgcagctatgcagaagaccccaagtgacaactgctgagcccgacccttctgaattcaaggccatgaaagaaaggtcatttgtgttgtttggggccacgaagttggggattatctgttacctgtctgtagtgactggcacaagatgtgaggcactccccagtagttacttattcatcacacttcctttcatagctggtccttgtcctttcctctggtgtaaagtacagactgtgaagacccgccctctgttccttccagctgtttttggctgtctcttgtgtacaaatgctgtaggagatgcaaaggtgactcgcagcatcccccaagaatgcctgggcttggtgctgccagaaaggtatatgaggagccccgggtaagccagcactgcaggcagcaaggtagccttcagctgtgtgggctggggagaacttcatggaggaggtagcatttgcaccagactttgaggtagatgggatttgaacacatggagtaaggggaaacaacatagactgaggctgggcctgtgtgtgaaacagcaagcaatcccttctggctggagcaggggagggtgtgaggaggggctgccagcctccctccaggccaagaaggccatcaggtctcactgggggacagtgaggagctactcaaggcatgatgggagccaggctggacttgaacaggactcattggactgtccaggtgctgggtgagagagggaggaggggacatggagccagcaccaggggacaagggggacctgaagcagctgtgaccgtggatggcagggaaaagaagaagaagggattcattttggcatagagttgggaattgcagcagtcacttgagaatgacagagatgggaaggttagggattagggtcagtggcatggacgtgagcgatgaacccatacaagtgggtgagaaaaaggctgaagaaggtgaggcagcatagggagtgggtgacgccagtgatggctgatgtggtgtgaccagaggaaggggccaagggggcggaccccgcagggtccataatggtggtgattgccttgggggagttcaggggtcgcagaagaggacctgattatgccatcctcacttgtaaattctgcttggtctcctgacgctatcagggtcagacccagccctctcatggcccgctgtgtggcatgtgctgctccctggctcttgcccatgcccctcctcctggccaagccacactccacctgcatcagccataggccctcccgccactgcccgcctgcaggtctcagcaccagcgttgcctccccagaagcctccctgaccatggtccctgttgtgtgccccaccaccccctgttctctgtccccctggtattggttcgtctgcttgtggtaactgctgaatgccagccccaatgcccccgcctcccatcgccatcagcgtcaccagcatcacaaaggtcagcacgaggtagctgctcacagaatatttattaagaataagaaattaataaagggactaattggtaaatcttaacatgcccacactgggtcttttccccatgtcacgtgagcctgaacttggaacatccatatttccagaagacatcaggctctttctctagtgaccttagaaatccccgcattgaagggagatggccctggcatggggcccctgccactgggtggggaggggtggggaccagactgtgccagggaccccaaggagttggagggtgcagagcttcttgacctgagtggacagggagaccctctgagctcatcctctgtaacaggatgagcatggactcttcaggggacaaacttcgtgcctcgtgtgaaaaacgaaagggccccacgggctgtgtctgatggtgttacccactgcacagggaaggcacctttgcaccccagtcccagccaggagagcagcaggtcgcaatgtcttgctagcctggcccctctgccctcaatgactttgcaagcaccttggcctccctgtcccactcccctgccggcacctgcgtgtccctgtcctgccgagctgccagcctcacctgcgtgcctctcgtcctcatttgaataggtgagcaaccaaagtcagctgtgccgttggagccggattccatcactcaaaatccaggcacagctccttttgaattcctcagctgccccgaggcaggggctcaatgttgatactgagattaatccccaaagagcttctcatttctctgcagagaaattaaagcttgccagtttccttttgcccgtccttctgacagctctgtcagtaatgatatgcctgccgcgtggcataatccgtgtcccgtggtaaagaataattcattaagaaatttagggcccagctcctttccgttgggttggtcttcaaaagttaactaatggcggcagcagcacgatgatcaatggaaaattattgaacagagctcagggctgcttcagaccagctcaaggagccacctgggtggagagcagtcagacccacccacccccttagatttgtcagcattccctgaaacacagtcagacggtgttgatatgaggtgtctgctgggcgtggacagtggggtggatggggtactgccctagtttgggaagcagcttatttttagccttgtagaagcagcgtgaagtgtctactggtaaagccagcacgacttctcctcccttctgaacaccagcaagaagcttctagatgtttctgatgaacaaataggagttcctgtactggctgagaggggcagcctacatacttaggttctttggggaggtcagtgcgtttttagcaaccattggcgcattgagcatgaaatggcgtggagctgaaactcactaccaactgcagtgaaaccaacaaatggaagacgtgaactgatgctggccctaatgactctgggcaagacgagggacattattgttttgcatgcattgataatgtgtcatctggaatcagattttctactttcatgttgttcgataacaaggttgtgccctgtgagtctgggattgtgtgaggcgagcgtgcgtattcattctactgcagaggaggctggggaggaatcagagcatcctgtgtctgcaaggtctggcgtgtttctaagggaaggcagagaaagccagtgctccaaagacagcagagcagacgcgaggtttgcaggcatgaggatgacaaatgaaattcgcagaattcctcagacttgatttccctcccttctataattaacctcagggataccttgactgcgctgaggtccatgtgcttgagcacttgctgtcctgcttgccctgccctcctctgatttttttttgcacagcatgattctatttctgctattgttcagaaaccattagcacctattcagaagtcagttattcagctttgagctgaatgacaattatttgaatggtaaagggtgttaatgtataattattcacattcataccaggacagtcacagtttaatcatttctctgtaggcttccttaagtttgtgcttaaagtcttaggcataattcttttgttaaataagtttaggaggctctaagtattgggaaagtgagtataaatacgcctctgggggagcttcaaggatgtggtgcctcacctccaggagcgagcctcctaggtgaaactgtcactaggcgccccacacttcagccaggaggaaggtccatttccgagggctggtagcataatctggcctccaggtgagctctgaggtcgtgttctggcgtgcccaggactagatggagcctaccggggcattcctatgtgtgacacagagccctgccaggcccggtcgggctcagagtgggcttaaattaacccttcagaccctcgattcctctggacccctctttaagatgattgacgaccccaaagagcttttgatgataagggctatattgtgcacatttgccatattggaaattaaacctaagacttttttttttttttttttttttttgcgacggagtctcgctctgttgcccaagcttgagtgcagtgacacgatctcggcttactgcaacatctgcctcctgggttcaagagattcttctgcctcagcttcatacaccctgcatatgccggctgcctcctcaagcagtacagctgggattacaggcacccgccaccacacccggctgattttagtgtttttagtagagttgcggtttcaccattttggccaggctggtcttgaactcctgatcttgtgatccacctgcctcggcctcccaaagtgctgggattacaggcctgagccaccacgccctgccctgagactttttaaatgtattaacttatttaaaaataacaacagtaaacctatggcaggatatcataggtaatatgcttctggaaatgagttttccaagacagacacttgaggagagtggcactgttgtccatttttgcagaatggaatgccttgatgcctgcctcagtggaagacagctgggttctcagatctgcctctgcgtttaatccgttgtgttgtcacatcacgtagcccccagaaaactcttttgtcacctgtaagagaatgagaatctaaaaggcaaataacatcctagtattgctatggaaatgattttgacctcacaaaccccctaaaggggtctcagtgacccctgatgatccctagaccacattttgagaatctctgttctaaaaagtccatttcttttactctaaaatattactcacattgcctgatatgttgtgggctcctccttttttaaattttttttattatactttaagttctagggtacatgtacacaatgtgcaggtttgttacgtaggtatacatgtgctatgttggtgtgctgcacccatctattcgtcatttatattaggtatttctcctaatgctatccctcccccaaccccccaccccccgacaggccccagtgtgtgatgttccctgccctgtgtccatgtgttctcattgttcagttcccacctgtgagtgagaacatgcggtgtttggttttctgtccttgtgatagtttgcttagaatgatggtttccaacttcatccatgtccctgcaaaggacatgaactcatccttttttatggctgcatggtattccatagtgtacacatgccacattttctttttttttggcattttttttaatttattattattatactttaagttttagggtgcatgtgcataatgtgcaggttagttacatatgtatacatgtgccatgcttgtgcactgcacccactaactcgtcatctagcattaggtatatctcccaatgctatccctcccccgtccccccaccccacaacagtccccagaatgtgatgttcgccttcctgtgtccatgtgttctcattgttcagttcccacctatgagtgagaatatgcagtgtttggttttttgttcttgcgatagtttactgagaatgatgatttccaatttcatccatgtccctacaaaggacatgaactcatcattttttatggctgcatagtattccatggtgtatatgtgccacattttcttaatccagtctatcattgttggacatttgggttggttccaagtctttgctattgtaaataatgccgcaataaacatacgtgtgcacgtgtctttatagcagcatgatttatagtcctttgggtatatacccagtaatgggatggctgggtcaaatggtatttctagttctagatccctgaggaatcgccacactgacttccacaatggttgaactagtttacagtcccaccaacagtgtaaaagtgttcctatttctccacatcctctccagcacctgttgtttcctgactttttaatgattgccattctaactggtgtgagacggtatctcattgtggtttggatttgcatttctctgatggccagtgatggtgagcattttttcatgtgttttttggctgcataaatgtctacttttgagaagtgtctgttcatgtccttcgcccacttttttgatggggttgtttgtttttttcttgtaaatttgtttgagttcattgtagattctggatattagccctttgtcagatgagtaggttgcgaaaattttctcccattttgtaggttgcctgttcactctgatggtagtttcttttgctgtgcagaagctctttagtttaattagatcccatttgtcaattttgtcttttgttgccattgcttttggtgtcttagacatgaagtccttgcccatgcctatgtcctgaatggtaatgcctaggttttcttctaggttttttatggttttaggtctaacgtttaagtctttaatccatcttgaattgatttttgtataaggtgtaaggaagggatccagtttcaactttctacatatggctagccagttttcccagcaccatttattaaatagggaatactttccccattgcttgtttttgtcaggtttgtcaaagatcagatagttgtagatatgcggcgttatttctgaggactctgttctgttccattggtctatatctctgttttggtaccagtaccatgctgttttggttactgtagccttgtagtatagtttgaagtcaggtagtgtgatgcctccagctttgttcttttggcttaggattgacttggcgatgcgggctcttttttggttccatacgaactttaaagtagttttttccaattctgtgaagaaagtcattggtagcttgatggggatggcactgaatctgtaaattaccttgggcagtatggccattttcacgatattgattcttcctacccatgagcatggaatgttcttccatttgtttgtatcctcttttatttcattgagcagtggtttgtagttctccttgaagaggtccttcacatcccttgtaagttggattcctaggtattttattctctttgaagtgattgtgaatgggagttcactcatgatttggctctctgtttgtctgttattggtgtataagaatgcttgtgatttttgtacattgattttgtatcctgagactttgctgaagttgcttttcagcttaaggagattttgggctgagacagtggggtcttctggatatacaatcatgtcatctgcaaacagggacaattttacttcctcttttcctaattgaataccctttatttccttctcctgcctgattgccctggccagaacttccaacactatgttgaataggagtggtgagagagggtatccctgtcttgtgccagttttcaaagggaatgcttccagtttttgcccattcagtatgatattggctgtgggtttgtcatagatagcacttattattttgagatacgtcccatcaatacctaatttattgagagtttttagcatgaagggttgttgaattttgtcaaaggccttttctgcatctattgagataatcatgtagtttttgtctttggttctgtttatatgctggattacatttattgatttgcatatattgaaccagccttgcatcccagggatgaagcccacttgatcatggtggatcagctttttgatgtgctgctggattcggtttgccagtattttattgaggatttttgcatcaatgttaattaaggatattggtctaaaattctcttttttggttgtgtctctgcccagctttggtatcaggatgatgctggcctcataaaatgagttagggaggattccctccttttctattgattggaatagtttcagaagcaatggtaccagttcctccttgtacctctggtagaattcggctgtgaatccatctggtcctggactctttttgttgataagctattgattattgccacaatttcagctcctgttattggtctattcagagattcaacttcttcctggtttagtcttgggagagtgtatgtgtcaaggaatttatccatttcttctagattttctagtttatttgtgtagaggtgtttgtagtattctctgatggtagtttgtatttctgtgggattggtgatgatatcccctttatcattttttattgcgtctatttgattcttctctctctttttctttattagtcttgctagcggtctatcaattttgttgatcctttcaaaaagccaactcctggattcgttaattttttgaagggttttttgtgtctctatttccttcagttctgctctgattttagttatttcttgccttctgctagcttttgaatgtgtttgctcttgcttttctagttcttttaattgtgatgttagggtgtcaattttggatctttcctgctttctcttgtgggcatttagtgctataaatttccctctacacactgctttgaatgcgtcccagagattctggtatgttgtgtctttgttctcgttggtttcaaagaacatctttatttctgccttcatttcattatgtacccagtagtcattcaggagcaggttgttcagtttccatgtagttgagcggttttgagtgagattcttaatcctgagttctagtttgattgcactgtggtctgagagatagtttgttataatttctgttcttttacatttgctgaggagagctttacttccaagtatgtggtcaattttggaataggtgtggtgtggtgctgaaaaaaatgtatattctgttgatttggggtggagagttctgtagatgtctattaggtcctcttggtgcagagctgagttcaattcctgggtatccttgttgactttctgtctcgttgatctgtctaatgttgacagtggggtgttaaagtctcccattattaatgtgtgggagtctaagtctctttgtaggtcactcaggacttgctttacgaatctgggtgctcctgtattgggtgcatatatatttaggatagttagctcttcttgttgaattgatccctttaccattaagtaatggccttctttgtctcttttgatctttgttggtttaaagtgtgttttatcagagactaggattgcaacccctgcctttttttgttttccatttgcttggtagatcttcctccatccttttattttgagcctgtgtgtgtctctgcccgtgagatgggtttcctgaatacagcacactgatgggtcttgactctttatccaatttgccagtctgtgtcttttaattggagcatttagtccatttacatttaaagttaatattgttatgtgtgaatttgatcctgtcattatgatgttagctggttattttgctcgttagttgatgcagttttttcctagtcttgatggtctacattttggcatgattttgcagcggctggtaccggttgttcctttccatgtttagtgcttccttcaggagctcttttagggcaggcctggtggtgacaaaatctctcagcatttgcttgtctgtaaagtattttatttctccttcacttaagaagcttagtttggctggatatgaaattctgggttgaaaattcttttctttaagaatgttgaatattggcccccattctcttctggcttgtagagtttctgccaagagatctgctgttagtctgatgggcttccctttgagggtaacccgacctttctctctggctgcccttaacatttttccttcatttcaactttggtgaatctgacaattatgtgtcttggagttgctcttctcgaggagtatctttgtggcattctctgtatttcctgaatctgaatgttggcctgccttgctagattggggaagttctcctggataatatcctgcagagtgttttccaacttggttccattctccctgtcactttcaggtacaccaatcagacatagatttggtattttcacatagtcccatatttcttggaggctgtgcgcgtttctttttattcttttttctctaaacttctcgcttcatttcattcatttcatcttccatcgctgataccctttcttccagttgattgcatcggctcctgaggcttctgcattcttcacgtagttctcgagccttggttttcagctccatcagctcctttaagcacttctctgtattggttactctagttatacattcttctaaatttttttcaaagttttcaacttctttgcctttggtttgaatgtcctcccgtagctcggagtaatttgatcgtctgaagccttcttctctcaactcgtcaaagtcattctccatccagctttgttccgttgctggtgaggaactgcgttcctttggaggaggagaggcgctctgctttttagagtttccagtttttctgctctgttttttccccatctttgtggttttatctacctttggtctttgatgatggtgatgtacagatgggtttttggtgtggatgtcctttctgtttgttagttttccttctaacatacaggaccctcagctgcaggtctgttggagtacccggccgtgtgaggtgtcagtctggccctgctggggggtgcctcccagttaggctgcttgagggtcaggggtcagggacccacttgaggaggcagtctgcccgttctcagatctgtagctgcgtgctgggagaaccactgctctcttcaaagctgtcagacagggacatttaagtctgcagaggttactgctgtctttttgttggtctgtgccctgcccccagaggtggagcctacagaggcaggcaggcctccttgagctgtggtgggctccacccagttcgagcttcccggctgcgttgttaacctaagcaagcctgggcaatggcgggtgcccctccccaagcctcgctgccaccttgcagtttgatctcagactgctgtgctagcaatcagcgagactccgtgggcataggaccctccaagccaggtgcgggatataatctcctggtgcgccgttttttaagcccgtcggaaaagggcagtattcaggtgggagtgacccgattttccaggtgccgtctgtcaccaatttctttgactaggaaagggaactccctgaccccttgcgcttccggagtgaggcaatgcctcgccctgctttggctcgcgcacggtgcacgcacccactgacctgcgcccactgtctggcactccctagtgagatgaatccggtacctcagatggaaatgcagaaatcacccatcttctgcgtcgctcacactgggagctgtagaccagagctgttcctattcggccatcttggctcctccccatgtgccacattttcttaatccacatcattgatgggcatttgggttggttccaagtctttgctattgtgaatagtgccgcagtaaacatacatgtgcatgtgtctttatagtagcatgattcacagctgaattctaccagaggtacaaagaagagctggtaccattccttctgaaactattccaatgaatagaaaaagagggaatcctcactaactcattttatgaggccagcatcatcctaataccaaaggctggcagagacacaacaaaaaaagagaattttaggccaatatccctgatgaacattgatgtgaaaatcttcaataaaatgctggcaaaccgaatccagcagcacatcaaaaagtttatccaccaccatcaagtcggcttcatccctgggatccaaggctggttcaacatacacaaatcaataaacatgttccatcacgtaaacagaaccaaagacaaaaaccatatgattatctcaatagatgcagaaaaggccttcaacaaaattcagcagcgcttcatgctaaaaactctcagtaaactaggtattgacggaacgtatctcaaataataagagctatttatgacaaacccacagccaatatcatactgaatgggcaaaactggaaacattcactttgaaaatcggcacaagacaaggatgcagtctctcaccactcctgttcaacatactgctggaagttctggctagggcaatcaggcaagagaaagaaataaagggtattcaattaggaaaagaggaagtcagttgtctctgtttgcagatgacatgattctatatttagaaaaccccattgtctcagcccaaaatctcctcttttttattttcgaaaaaattacagcagagttcactcttcttggtgtgcagcaggaggtgcacgtgctgtgcttgtccatcagtgtctgctttgtgcatctctgttgacctgcctctaacactgggacgagcatcagccaaatcagaaccaggtcagagcccctacgccctggtcagatcagaaccaggtcagaactcccctacaccacagtcagatcagaaccaggtcagaacccctataccaagcttgtccaatcctcagcctgcgagccacctgcagcccaggatagctttgaatgtggcccaacataaattcataaactttcttaacacattatgagtttttttatgattttttttaactcctcagctatcattagtgttagttattttatatgtggcctaagacaattcttccagtatggctcagggaagccaaaagattagacacccctgccctacaccttggtcagatcagatccaggtcagaggccctacatcctgtccccacagtggacaggttggaaatgtaaggtcgtgtggccactgggggcccaggatgggctctgcctcagaggcacttccttccacctggcctgttttaatcaacagtcattaaagggaaatctaaagatgtttaaaacgttgtgtattttctcgttagcagagccaagaatcagtctgcagggagcaaagagcttgagtgtggagttagaagtcggggtccgggaaagggtgcttgtttctgaggctaacatgcatcaggtgctccaagtgggctctcattgaccccaggatgccatcagcccccttgccctgcctggagtatatcacatgggccctgggtgcctgggcctgtggagccacagctgctgaggtccggtgtttttaaagcctgagagaggccatctgggggtagcactacaggagatgggaagaggcccccaggaaaccagggagagcaagaaggtcttctaaggactcatgtcctcttaccaactaccatgtagttaagaatgccttacgaagggggacgggagagtcaagggatagaaaatcagtccttaaaatctgcactgtcctttccacatacaaagcacctttcacacaggtgagctcatttaccctcagatggcacttactgttgtgggaacctcattttaccaggaggaaacggaggggcgacaggacagcgttctaggaagtagctcagctgtggacattttgtggtgagctctcagggacagcagcaggcatgggatgcctgcagagaggctttcaggagagcgctggccccacctgcaggcccccagggcgaccttggataggctgccgtctgggcctgggagacttctcacctgcagagtggatgatgggggaccttgaggactgaacaggagaaagcacactgaaccgagcctggtacctagtaagcactcagtaagtcttggcacttactgtgataattgcattttaagcccagctaccaaaatttccagacctacgttaccatcttcaaatgagtgcccctacccgtttccctaacgttgctcaaacttgcattttctgaggagcgtctgttggatgcctttggcccttgcaccacgtacagctttccacgcttattggctggccactgggtaccaaggaccatggcgggcactctggaatgctctgttttggcaaactttcttccccaagaacagatttgacttttgaaaagtggtctgaaagtcagcctccccagccctggtcacagcagaaatagttttggacccaggtgagttgagtccacaaaataacaggccgtgtctacttgagctgaagccttatcagttggcccagtaggtcccatctgaagaagccctgtatttttgaaaaatgttaactctccctaaaaggttacattgaacggcaacacccgggaggctgctgttggccttgccagcaagctgaacctgcagttgagtggccacgcgtgtggtgcgaggcgtgcagcccatccctgagggctcccctgcatgggaaaggaggctgggaggttcgccaggactgcatgtggccctcgcaccaagaacctgacccatggtggaggtggtgagtgctgtgtggtcggccttgatgtttatacgagagtctctgaggtgtagacatcagtgtctccattttggggagagggaggcggttttcttcccagcttaccattaccactgtgttcgaggagggactgatatttcgagtggggtcaccatcacactcacaccaccaaggctgctttccaccactcagctttctcatgcatcccgtttcccagaggtggccagtgcctgggccctgagtcggttgagactcatccagagcagagctgcagaagctgggctggctccagacagagatgacccaaagcctgtgtcagcatttgggtgcctgggcccaccgtccaggcctgagagagcatcagtgaggctcggagcccccatcagccaggtcaggccgtggctctgagcctagtgctcctttctaaatgggagttgcaacgccagctttgcaaagtggttgtcagggctcactgaggggctctggggagactttgggggaaggataatgattggggaagtagaaattggctcccaaaatgctagagcaggacttaagggactgatggccaggcacctgcccagtgtggcatcctcccatcgttggctcgagcgctgagctgcacctctgtgtcaggacttgctctcagtgttctgtctggggaggtcatgtgcctactgggtggggcaggtccttgtgtgggaggagccagaaactcccttttttcttaaaagttattgggccagaggtcatgaattcacccttagcctatgatctccagtaactctaccatccgcaggaaaatgacttcacaccatgcgtagggctggaaggagcactgggatggagtcccacctcggtgcgcgacccggggcgttcagcagtgccccaggaccgcagcagcccatgctcagagccaggtcctcagggccggggcattcagcagtgccccactaccatagcagcccatgctcagagccaggtcatcagggccagggcattcagcagtgccccacggctgcagcggcccatgctcagagccaggtcctcagggctggggcgttcagcagtgccccactaccacagcagcccatgctcagagccaggtcatcagggccggggcattcagcagtgccccacggctgcagcggcccatgctcagagccaggtcctcagggctggggcgttcagcagtgccccactaccatagcagcccatgctcagagccaggtcatcagggccggggcattcagcagtgcctcacaactgcaacggcccatgctcagagccaggttctcagggccggggcgttcagcagtgccgcacgactgcagtggcccatgctcagagccaggtcttcagggccggggcattcagcactgccccaccaccgcagctgcccatgctcagagccaggtcatcagggccggaagatggcaacttgatgcttagccttcaaagaggtggtaaacgataaaaaaacggagccatgcctggattcaagagcctctgaaatcctaccacctaatcactgtcttccctaatttccccttggccgctatgtgggtggtatatggtgggctgttgggtggagcggggcgggtcgttactgatctatctggaatacccgctttatctctacccagcaaactgctacccatccaagacccaggcccacctgtcacttccactctggcacctcgttcgccatcacctcactcaggagggttccactggtgcttgccggcgaacgccaccattttttgcagcatatctcatagcttgttggaaacccacgttgagttggggctttgttcatccacaggtgctgtcacgcatccgttttcaggagacagagatgtcctctgtggccctccgttggccgaccctgttgggtgcagcagctgtcagtggacagaggtgcatcagtgcgttggttggtggcatcgtggcctcaccggcccacagttctgacagaggtgtctgtgtttcaccaactcagtctgtccctgcccattgtccgcacactcattccctccatgccccagtctggcaccctcaagtgcaagtgcgtgcatttaattcacgtagtgtgttggttgggtgcactcctggacctttggggagactgtcttcttccatgttagctgcttccttcttccctgtggggtcatagaggtcacagctgacatgctgaaacaaatgccattgttttcacttaaaccacattgtattccatagccgctgtgtcatatgcgtatatataatagtgtgtaaggcgtatggaaagaagagattgtgtccagactggctacagatggtcatcctaatggcggaagcagccaggccagttgggcttgactctggagctttggagggccatcctcagtgtatttgtttttatttgtggaggccccgcagcgctcatgctggccatgcctggctgggatgggatgacctggtgaggacagaggaggacagcctctgcttccatgatgaataaaacagcatctggctgggtaggaggaaagcctgtgcttgttcagcctcaagtacgtgtttgaaagcttgccccaaagacattccaaaaaccaggcagtggtggtgtcctgtccttctagaggccaggttgtccaggcccaggggagtcttgcttaggggtcagtgagcgctgggactcagtctggctcctggcaagcccagagaaccccactgctgagtctctacacaaggcattggacggggctgctgtgggtgtgcgccaggccacctccatgcctgggcagctgtgcacaagctggctatgagctccatggcatacagagcacgtccaaactaacctggtagcccagtcccatggaaagtgtgtgacatcgtgtccctgccttcggagtgagcaagccacaagccagatgtcaggggctgttccttctgcaggtcacccactggctggccaagcaccgtgaagctgggcgcacctcctccagggaccatactaaagcagctagcagcaccttccccctgctgtgaaccccatgcctgacctgagcctgagccctcacaggcctggcaaaggctgcctgcagaggcctgggccacacaggccctatggctttcctgcgtgccacggagagccagccagtggggctgcaggcacctcctcccgctcactctcagtgtgcgcctccacagggaccacagaccacaggagctcctggcccgccacatcgccagccgtgtgcgcaaggtttatcaggttcctcttggccaggttgaagtagatgccgggtggggatctgtaggccctggttgtgtttacagaagatgctgcccttcactgtcttccagcctcccaggaaaggatggtccccaggctccatgctgacaccacccaccttgcttcacccagtaggcgcttactgtatgtctactctaggtcatccacagtgctgagtgttgggatagagccccgggaggtaggtgcctggtcctccgtgagtctggtggaggagccctccgtggtgacagccttctgtgagagcatggcaggtggtggggcctcgtagagggaaagattttgcagaaaatgtgacctagattcccttttaaataggaaatactggtccctagtgtcttgaactttggggagaaaactccctttgattaaagagaaggtaacttggaaatgtgttttccctcatctttttgttaatttattttttaaattaacatgtagtgaaattggctttttgtggggtatacagtcccgtgaatgttaacgcgtgtgtgtgtttctgtaaccacccccaaaatcagggtgcagaggagttccaccacctggacacccccacgccgccccctggcagccacggcctctccccacccccattccagctctcagcaactgcgacgtgttctccaacaccgtggctttgtgtttttgagaatgtcttataaatggaatcagacagtatttaacctttggagcctggcttttttcactcaggttaatgcctttgagattcatccaagttgttgcatgtatctacagcttattcatttttcttgctgagtgtacgctaccgtgtgggtatatctccattgatctgttttttattttggccattctaatagatatgtaatgatatctcattgttttcatttgcgtttccccgatggccagttatgttgaacatcttcttttgtggttattgacccctccttatatcctctttggggaagtgtcaattcaagtcttttgccttttttttaagttaggtggtttgttgagtttcagtttggaactgttgagtttggaaaaatctttatatattctggataggataggactcttgttggatttcttatttccaaatattttctcctagctagtagtagctagtcttttattctcttaacactgactttcagccgggtgcggaagctcatgcctgtaatcccagcactttgggaggccaagggggcggatcatgaggtcaggagatcgactgcatcctggctgacacagtgaaaccctgtctctactaaaaaaatacaaaaaaaattagccaggcgtggtggcaggcgcctgtagtcccagctactcaggaggctgaagcaggagaatggcgtgaacccgggaggcagagcttgcagtgagccgagatcgcaccactttgctccagcctaggggacagagcgagactctgtctcaaaaaaaaaaaaaaaaacaaacaaaaaaaaacacctgactttcatagaccaaactttttcacaaacaagttttttttccctttttaatgaagttcaatttatctctctcttttttttatcatgatttgaaggacatatctaacaactgtttgcctaaccccaggtcatgaagatttgtcatatagtttctttttttttttagtttaatgttttacatttaaatctatgatatattttgagttaatttgtttaagtaagtcatgagatttacatcacgtttcactatttgcctatggatatccaattttccagcacctctttttgaaaataatatgctttcttcattgaaatccctttgcacctttgtcaataaacatttggtcgtgcttcagtaggtctattttggaaatctctcttctattctgttaactccatccagtaactccatcaatactccaacaagctgggtatttatccctttgcaaatacataattattattatgtatagtaagtcttgaaacctgtcagtgtgatttctctaaccttttttgtctcttgtaaaatatgttggctagtctcaatcctttgccctttcatctaaattttagagtcaacatgtctatctgcaataaattcttctagggttttttaattggaatgataataaacctataggtcagtttgttagaattcaaattttatgatattgagatttccatgaacatgatatgtctcctcagttattcagacattcttgtgattactttttcagcattttgtaatttccaacaaacagagcctatatacaaattgttagatttacatctaagtattttatttggttggagccattatcagtggtatatagaaaggtgattgatttttatttagtaaccttgtatctagtgactttgctaaactcacttattagttctaagacttttctattatttcctgggtattttcccatagacaattatgttgtctgcaaatagggagagtttgtttcttcttttctaaaacaattgtcttctatttcctcatcttgctttttttgcacagttaggtatgatgttaactgtgggttttttgcagatacagttgtcagattgaggatgttaccttctgttcttaggttgctgagagcttttatcatgaataggtgttaaattgtattaaatattttttctgactggatatagattatgtgtttttctaggatattaatatgatagctattgttcgtttttaatagcctttgtttttagaatagtttcggatttacagaaaaattgaaaaatcagtagggttctctgatactgcacacctattttcccaaattataccattgattcttattatgatgacatttacacttgacatcttacattagtacggtacatgtgttatgattcatgaaccattgttggtaccttaatattaactaaagtcctatgatcttgaagttttcttagtttttacctactgcccttcttccattccaggatcctgccttggatactgcattcctagctcctttggcccctcttggctgtgacaggtccttagttttagatggcctagacagtgttaaggagtactgattaactattttgtagaatgttcctcttttggaatgttttatgcttttctcatgatttgactggagttacagtgtgtgaggagaaaaaccacataggtaagctgtcattttcctgagatcgtatcaaggagtcatgctgtcagtgtcatttatcattgttgatgtcaactttgattacctggctgggtagtggtgtttgtcaggtgactctatgataaagttaccttcccccatctcccctgcgtactgcactcgtcccgaagaagttgctgtacctaacacacttaggaatggggagttacgctccttgaagacagagtatctacataagttactgggaatgcttctgcatgggagagttcttctccctcacctatttctgtattcagtcatttttttatgttagtatggactcagggatattgatattttgggttgtcttccaatactactttattttgttgctgagattatcccagttttggccatttgggagattgtgcagtttgctcctgtgtccctttgtcgtactctcctcatcgtggtttgactggaatgtttgtctttgttcttttgcttcatttcattttggagtgtgtcctgactttctgatactgcaagattctcaaggctcatcttgtgtatttcctgtcccagtcctagggaggaaaaggccagttcttgaaggagtcttgtgtcttttattataaaatgcatgagaaaccatggactgggcactaggtttgctccttgctatgggggtggtgttgtttctaagtcttctcagttgacagaccacagaagtagctttctgtatactaacccacggacagataaatattgtaaacatttctgtatgcaattatctgtgtctatattaagctaaacattagttcctattgatatctgcaactctaatccattaccacatggattcttctagcctcctctccttacttatctgtaaaatcccactcacaatgagaaacctggctcacactttctgccatccatttacttaattattcaagcccagtatacatatagaatagtatcagagagtttaacacctgtgctcatgggaaacaactttatcaactagagttcagtatttatgtacagttccttttgcctttagtcttacagactccactcactttcaagttacttttggagaaatcagctcccctcccccattcagtgaggacgttttataagtttataatacagtcagattctcttgtcacagtctgtgtttcttcccaggatcccctgatctcctaaatattttgttgttgttaatttacatacattgcttagattcactctttgtgctgtaagcttctatggcctttgatagatgtatgatatcatgttttcaccattacagtaacatgcagaataattttacaccctaaaaatccccctgtgctccacctattcagtcccccgctccttctgaaagtgccccggcaaccacttatcttttttctgtctatatagttttgcttcttccagaatgtcatctagttgggatcatacagtatgtagccttttcggctggcttcctttgcttagcaatatacatttagttttctccgtgtcttctgcatagctcatttttttcactgaataatattccattgtatggatgtaccatagttgtttatccgttcacctatcgaacaacattttggtcacttacaacttttggcagtgttaataaagctgctataaacattcacaggcaggtttttgtgaggatgtcagttttcaaatcagtagagtaaatacctaggtgtgcaattgccagatcacatggtaaggctctgtctttgaaagaaattgcaaaacagtcttccaaagtggctttaccattttgcattcccatcagcaatgattaagcatcctttttgctccacatccttgccagcagtttttggtactgtcactgtttggatttttagccattctaaaagccattgtaatcatattcattattttagtgtgcagctcctaaagacaaattatgttaaatatctttccttgtgcttatttgtcacctatatatattctttggtgaagtgtctgttaagacttgcccattttttaattgggttgtttgacttttttcttgttgaattttaagagtctttttataatatattttagatgcaagtcttttttcagatatgtgtcttacatatatcttctcctagtctgcctctcgttttcagagtctcagcatcttttgtagtaaagaagtttttaattttaataaactccagcttattcatttttttctttcatgaatcatgttgtatctaaaaactcttctcccaacctaaggttgcttagattttctcctgtgttatattctgaaagtttatgattttcccttttagatttaggtccatgatccattttgagttcatttttgagaaaggtataaagtctgtatctggattcacttctttttcgtgtgatgtctaattgttccagggccatttgtttaaaagactatgctttctccattgaattgctttttgcttttttttgtcaaagatctttgtcaaagtctaaatttggcccttgtatttatgggttccacatccatgtattcaaccaactgcagataaaaaatgttcaacaacaaggaaagaatggttgcatctttactgaaagcgtacagactttttctccttgtcattatcctctcaacaatacagtataacagctatttacatagcatttacattattctagatatcctaagtaatctagaaatgatttaaagtctacaggaggatgtgcaagggttatatgcaaatactatgccattttatatcaggaacttaagcatccatggattttggtattctagaagggtcctggaaccaatacccaatggataccaaggaatgactgtatatctgtgtgtgcctgtttcattgacctttgtgtctgttcttttaccaatgccaccctgtcttgattactgtagtttcataatgtagatttattttcaaatattgaatcagccttgctttcctgggacaaaccccacttaattttgatgtcttgttctttttatatattgctggatttgatttgccaatattttgttgaggatttttaccctgtgttcataagagatactgaactgtactcttttggtttctgactttttctggttttgatggtggagtaatgctggtctcataaaacactttagaaaatgttcctttctctggaaaaaattatgtcaaatcaatcttatttttaaaacattttatagaattcactggtaaaaccatcttggccctagaggtttctttttcagaagattgtaagctatgaattcaacttctttaataattataggagtattcagtttcatcttggataagtttggtagtttgtagtttttgatgcattggtctattcgcagttgttggattttagtacacagttatttgtaggaataccttattatctctttaatatctgtgggatctgtggcaatatcttctcttttattcctgatattgattatttgtttcttcttttctgtcagtcttttagagatttataaattttattgatcatttcatggaactcatttttaatttcttggattttactcttatcatttgtctgttttcaattttgttgattttcgcctttgcctttattatttcctttctggttgttttgagtttatttttctcttctttttctggtttcttaagttggaagtttagattattgagacctttcttttttaatatagacacttaatactataaattttcctctaaatattgttttagctttgtcccataaattttaatatgctttattttcagtttcattctgttcagtatactcttttaattttccttcagactttctctttgacctattgattatttagaagtgatatgtttactgttcaaatgtttggagaattttctattatggtttttgtcgatttctagtctaattccattatgatcagaggatgtaacttatatgattgcagtcattttgcatgtgttaaggtttatggcccagaagaatatggcatatctttgtcaatgttttatgcacacttgaaaagagtatagattctactgttattgggtggagtgttctgtaaatatccattaaatccaatcggttgataatattttttatttgtgtatctttgctgattttctgtcacctagttctattgattattgagaaagaggtgtttaggtctccacatataattctagatttgtctaattttccttgaattttttcatgagttttgaaatctgttgtaagacacatatacatttagaattgatgatttctttttgtgaattgaccctctcactatgtaatattcctttttaccctctgggaattttatttgttcttaagtctgctttgtcttttattaatttttttttacatttgtgtttgcatggtatatctttttctatccgtttacttttaacctacctacaggtatcatttgaagtgaattctttatgacggcattttcttgtgcatgtttttaaaaatctattgtgacagtctctatcttttccttggcatggttagatcatttacatttaatgtaattattaatgtttcaatttaggtctaacattttattgtttgtgccctctttttttcctttttcttccttcttttgggctatttttaacttgttttagtgttttgttttatttgttgtggtttttactatatctcttcatatagtttttctagtgactgttttagggattataatactttctttcacagtctaattagaatcactgttttacctttttaagtggaatatagaaatcttatgactatatagatccttttagctctcccattatgttataatatcatgcattatgtttacataaattgaaaatctcatttcatatgtcataatttttgcttttggctaataaacatatcttgaaaaacttgaggaaaatagcctgtaatagttttccatatacttacatttttcttactctgcctgcattcctgatgttccaagcttctttagagtaagtatatggataactataaccatcatttcccttttttctaaagaatttcctttagccattctaaagatcagatctactggcactgaattaccttagattttcctttttatcagcaaatgtctctaactctaacttcattcctgaaggattcttaaacatcggatatagaatcctgagttgtcaggtttttttctttctttcagcacttcaaaagtgctgttttacttcctctggactcagtagtttctgatgagaattccacattcaaatgactgttgccttgtacataatgcattgtttgtttctagtggctttcaagactttctctgaagctttcagcagtttgatcatgatttatctgggaatggatttctttgaatgtgtcctgtttgcagttttttgggcatcttaaatctacagttgtgtatcttttgccaaatttgacaaaattttagctatcgtttatttgaattttttcccgtactacactttttttcctctttttctgtaactccagtgacataaatagatctgttgaccttgtctcacgtgttctctttttgtctattttaaatacttttttttctgttgtttggatgattttttgttaacttggcttcagttttattgactcttttctcggcatctccattctactattgatcctatgcagtacagtttttaattttggttattgtatttttcaacactaaattttctactttattattcttgatagcttctatttgtgttttttcatttgtttcaagagtgtcttcccttgcagcatttttataacagatctcttaaactttttgtcagatgatttcaacttttgggtcatctcagccttggcatgagttgattttttccctggtgagtttatttttctgattatttgcatgcttggtaattttggattgtatcctggtcattttgaatattatgagactctgggttttatataaatcctacagataatgttgatatttttgttttaggaggtagtcaacctggttggatttagttagttcataagttctgaccagccttcaatatttgttcaattttcaaacccttttccgtcctcttaacatcagttcttttgtgcaccactcaccagccagtttgggaactggcagtgccgaattcttacagcagttctcaaagtctgtggtttagggtcagatacacatgtgcataggcggggaagtagacagctcacccgaacaggtgagtccagaaatctatcaacagctttttggtttgcttccatgaactccttttcctccacaatctttttggcactttttagttctcagggctccctcctcagtcccctggacagacagctggggcttttccccactccgctaaactcttcctattactaaacctcaatctgggtccaagcattaggaagacagaggtaaagagcaaagacatttcgcccacctcttagggggagcacacctcttcccatcagaaagggaccatctccccctcactggtttgggctcctgcggcccctgttgtcccccacaccacaggattgcttagggaggagctgacgttcaagggctcagagataacaccaaaaagggatgattcctcactcgccctgaacatagttgtctcagcccattttctgctgctataacaacactgccatctaggtaattgataaagaataggaatttattgggctcacagctctggaggctgagaagtccaagagcatgacgccggcatctgctgagggccaccccgtggtggaaggcattccatggcgaggaagcatgccagacaggagaaaaggggccagagtccctcagtaaccaattccagcagtaacagcattcatccattcctgagggaggggccctcatgacctaatcacatcttaacactgtcacagtggcagttgtttccaacacaggaacacattgaaaccttagcagcaggtgatgcttttccttcctcaaagtggattagagccgagcccctagggggctccccagctgtgccaggctttgcctccagggctcaggctgtagtaagttcgggctgaggacaacagagggataacccaggaagcccattcatcttttccatggtacttgaaattcttatcttctttccaaggctgccaactactactgactcttctcagccctcacgtagctgctctgtgccttctgcccaggttttataaagacattcagtagaagaaacaagtatagagtgcttgcttcattttacctggaaccagaatccccctttccctccatttgtgtttcaggttagtttattctggctgcttttgatggccagggagcattaggtcaaatagctgtgacttgtgccagggacaccagctcctggggattccccttccaggccagtggctgctgcacagggatgtcctgcaggagctgaggacctgctctttcttgctctctgttgctctttgttggccatggccacagcacagctactgagatgctctgcaagcatgacccggcaggtagcacctgtgtgtatgggcctgagtatgcccctgctagctgcagcctggctaaggaaaagtcccaaagcctgggctgctgaaggatgccccttccccccaggaagccacacggaccttgacaggtcaccacccatggagctgtgatggttgagggaaaggagactcctcctcaagaacttggaagcacaatggcctgcctcccaggaaagagagcctcagtgcttgtcggagccctgatctcagagagggccagctgcctggccagctctgctgttgcctgtgctctgagcctggccgtgtgcagtggacgcacaggtgtgtttgctgaggtggctcgtagcagattatcaccgaggagagatggacacccaggataaggaagtgatgagtctgagcacagcggtggcagagccaggctggtcccggtctgtgtcctcctgccgtgctctggtgtgtgttgtcttccttattggagctgggtttggctgagttggtccaggttcaggtgtcaggcctgctcagagccttgagctccactccatggcgtggcatgaaaacacctcgcataaaaacccagtgtctgtgacacaaaacgatttctcccgtgaccagcatgagaaaagggcatccagacccttggcggaggatgcacaatgcaggcagagggtttagaaaacagtcttctctgggtgaggcagttatggtgcacacatttaaatagctgcccaagccgaaatgaaaatagccatgtccttcagatgcagagactccaagatgcaggtcctctcccttgaccccagccacagaagcccagcccaaggtacccagcaccacaggacaggcaggaggaagggcgagtgtgggaaggagacaagggaagtggaggggtaagagaggaacatccagaatgtggcgttcggaggccgcgtcacagagccccaaggtctcggggctgccctctggggaggcccatggtgaaagagagaaggctgctggggttttttttgttttgttttttgttttttgagacggagtctcgctctgtcgcccaggctggagcgcagtggcacaatctcagatcactgcaacctctgcctcccgggttcaagtgattcttctgcctcaccctcccgagtagctgggactgcagacgagcaccaccacgcctggctaatttttttatttttagtagagatggggtttcaccatattggctaggatggtcttgaactcctgacctcgtgatccgcccgcctcggcctcccaaagtgctgggattacaggcgtgagccaccgcgcctggaccagaaggctgctgttttaatggttgcccctttgggccacctgaagtgattgttccagctgctgaggactgatgtggtcacctcaacctcaagaacttctattttccacatgagttaatgtctatgagtggatttcactccattatagaatatgatgcttaacagcaaggattgcccttcttcaagaacgggtgtcattcagccatgtgattctgcacaggctagggttcgaagcactgtgctctttgagagctgcttcaactaattactgcattcgttcgctgcagggtgaaacagagttttcagatacatttgtaaaatcaggtgcctgattgctaaatactacattgtttgagctatacttcctcatatgttgcctggtacggaccagttaagaaatggtttcccatgagaaactgacaatgaagctgaacatgtttgataaactctgtgctcatctatggacatataattgttttattatacgatacttttacacttggaaagaaaggtgctccgtaatttggcagcaatttgtcagagcagcactcaaggctggcgctcagatgaggcccttggaaccatgccattgtttctcggaactgctctgtgctccggttaggtttgcacacacctccctcgtttcattcctacaagtttagtaaagttccaggccgttctcccagaacacctaacggaaagcacagaaaacaaaaccaccaactctgtgttcgccgaggaaggcaggaaattggcctctgcttcttgcggtattgacgtgctgctttcattgtttcttttccaagacagctgtccccgaaatctctttacctccaagtcaacagcaggctaccttgctttgctttgcttttttttaaagttaggcataacaacaacagcaaccatgataatgattaacagtttgatttcaaaacgttttctgaagaaatgacagtaaacagtgcatttgcccagggaaatccaccaccccgccagccatcagccggtaatacaactgcatgtgctaatgaacccaaagctgttaatgtggtttcttcagttaaattgattcatgaattttgaagagaacattatctaatgaattttctttgaatagaaagcaattaaaaggacaaatcagtctgattaaccccaaagtcaccctcctgccacaaatggtgtacagtttgaaattatatcataaaaaactagagcacatttgctatctttttgccctctactaatccatgtaaattaatgaacaacaaagttaatttctttgatgacccttttctagtatcacctggattatgctgatgtttaatttgcttaatgttataataaagactaaacagatttttttcccagtgaagtgattatcgttcccttcagttaagaagtgatttttattatttaacacacatgtaagggtgtgtttcctttaagaaccaaatcacactttgccagcttggcaccaagtgtaattagtgttcttgtggacacactcagaacatcgttcctgcccgcggaagccttccctttgttgctgctattcagaaactcctgcccctggaggggctggagcccctgcgatggaggacatggctctgtctccagtgctcctgagctgcatgtcccccttggaaagacaataggtactgattcagacaggccttcttcgcgtgccccagtttctctcccaccgacaccactcccaggtaacagttctgaaacctggaggcagagggagagaatgttctcctgcagtcacctcctcattcctgcagcaggatgcggcacaaatgcagttggatgtggttagtcaattaaaatgggaatcaagtcattttatttttgcagccctattcactaaagatgcctgtaaccaaggtcaccgccagcccctgcgtactgtggtgcttggcactccgagcagtagctgggggaatcctgcacgcggctggaggtggacagccggcataatatcgcagcctggcctgtggctgcttttgccttctttgtcccagttgaagttggaaattaaccagcagtacaaaagatttccaagcaggcgggcaggcagggacttctgtgtgtattaattgagccatgagctcacttacacacgcccagtcgctagaagagtggcacacgcaaccccacgcggaacacgggaagatggaaagaaattgcaaacctgtggtgccagctccaaggatgccttccaaggggccagcctgcatggtggcctgccacatgcttgcgtctcctcgcctggtgacatggtggcagcagtgcatggaggccgtgttttaattgagtataatacctctatttgtgtagatgcgtttcctgttttgggactagtggctatttatatcagagctgctgaagccgtttgtccaaataacattatcctgcattcttcctttcagagtcgttcaccagacaggtgttatggaagctgctgaaggttgtgaaattcggagaagtgatttcttaccagcaattagcagccctggcaggcaaccccaaagccgcgcgagcagtgggaggagcaatgagaggcaatcctgtgagttctcatggcgcaagcatggctgtgggtggcgggtgcgtgcaggtggcagggtgtcatctgatcccacgtgtttcctcggaaggcaggctgtgctgctggggtgggcagaggggcgatatctgtgatggggaccattatgccagatgcctccagaagaggcaaggaggctaccccagcactacactcctggaagctcccccctaccgggagcacatctccactgcatgagctcctggttgtcacagtgagcaggagaggagggagcctggaggagtggcaagcgggcagagggtgccccacctgctcactcaggaggtggacgtgttgggtgcctgttttatggcccacactcttctaggtgcccagagtacagcagctaacagacagaaaggtctacctgcgaggtgcctgcatcctagcaggatggccaagcaagggtgcacatccaaccccatctctctgtgggctgcactccccctgaggcccagggctccctgggtcccaagagctaaagcaccacacgtgagcacacgaggcaggaggccttgcagcatgggacaagggacctagaccacacgcacctcgtgtctcaccagggatggcgccctccccagagcccttctgtgtcctcgtccttcccatgcgtctgcagtcagatttcactaaactccaggctcccaggctatgcagcctcaggccatgctccccagaggacaaggcccaaccgggacacagcatgggtggggcagcgtggcctgtggtgcctgggggccacgtgggtgccgttgctctcccatctcacagcacccaggcctggcagctgggccgcgggccatctggcatctggcatgaggtggtaagtcacagcatgccatgtgcgcccggccaaggccacacgtgcctgtgtgtgtgggggcagaaagggtgccccgtctgcgtggcccattgggagaacccacacaacctcaagaatgcccctggaatattcacccagtgatggtgtgtggtcacgttggcagtgtcttctcccgaaagctctgtgaaagtttctagcatgatggaagcataccatctgatcagggagcacaaatatgatcactccatcatgggatgggaaattactaaatcagatagacctcactttttgaaaaattgctgtggctttactgtctatttccaaaactacttatatccctgctcacaggggagaggccggcgtgttcataccacagcctgctgctcctgctgcccgctgcagcagcctgggggcagagcctccgtttctaggagatgacagttacgtaggcttttgcacaaaactgcattgttagtccttaaaaagcaactctggtaggtttgtagtggattgcattgtcgtaatgtacaccctaatctaggcgagctttctaccctattaaaatatcccaaatatcccaggagtgagataccacagggacagccaccatccccacctcctccatctcttcctgtcctcagttttggtgacagtggctggtgggcgcaattgacccttccttttgcacctgttgcacattaattgcaatgtcttcagctacattgtcataaaacatctgcaccacgcagtagggatctgatttttacggcgcgttgggggatatttccgaatcaaatttctgaggatggtttttgacatttcccaataaaacttaacctacatgcccctctggaaggctgctgtcttctccccggttgtgagtcaattttgaggtgttcaacctgatgaaaaggcagctcagatgctgttgtgttgtggctccgtgtagggcccatgagaactgtggatgcgaatggggttttgggggtgctcttcctgcatcagtgcagtgactgtttcaggcagtgtctactctttgtgccccccgaggagagtaagtccttgtcttctccccactgaggtggattctgctccctccgtgcacacacatgaagatgggagtggccccgtcagcgggcgccgactgctcgctcccttgtgtgtgcagctccccttttgctgtaaggacaagctccactaactgacatgtgcagcgtggcagcaccctcccccaccagcctttggtgatgccagcagtttctcactctgcagtggagatgccgtcgctggttagcaatcctgcttgtggcgatattcggagacatttattgttctgcaaaccagcgtgactctcttctcctgctattaatctctatgagtgtctctgttccagtatggcctcagtcactgaaatgtataaagtagtatcacatgggatgtaaaaccctaatgtctgtaaagtccacacatcggcaccctgtcccatggcaaagccaagactggaggtgagcacagcatcaggcaggagggttctacaggcaccaagtctcgcccttctcggcgtccacatgcctcctgtgccgagggcagccaggcggtggtggcttctcgtggcctttctgtgggctccaccgtgtgcagtgaccttcagcctgaggagggggctgcagcaggacctgtggctacggtacccacagacgcctcaaattatagcacagatatgccagagatattcctgcaagaagccttcagctacgtagtttactatggttcaggttgacagcctcccaagttcccattagaaacctcattagaatgggctaggaggatgaaaaggtgacccagggacttgctagaggaagggcgctggccagcagtgagccattgctgctgtcagtgtcctcaggaatgtttccctttggcgctgacagcagtgtcccagccggaaggctgcgcacatccactccagcccagacggtgcgtcgctgagactcgctcattgaaaacatcccttatattcaggatgaatagagtgattgtgcatttaagggaggagagtgaaaaatggacttggaatgttagaaaacatcgtaaagctcattgtgcattaattccttaggtggcttgcaataaacaggagcacgtgctggttcatattactgcatttgctgtcggcatgagtttctcttccccaaccggagtaagggatggcttttgccatgcggagctttcctctatcctaggagcttgatttctccagaatcctccaggaaggactcaccagccggtgtaaggtggttggtcagcattcctggaaggctgtctccccaactcagcgggagaggatggtcagtttcccagtatattgagtagaaaactcctcacgacccaccccctccacaaagcacccttcctcttcatcctcagacagaatttgctaaatgcagttcaaaggcaatcgatacattgcacagagagtctccccacctttttctgaacaaatgcattcctgaggagttagtttattcacggattgccatgagcgttaatgaccccccgaggcttgttctgcccgtcacccggatggctgctgataaagacttagcatcatgttctaagtgtcaaggttgtcagtggagctgaaccatttgaccagaagaaaaaaacgcacagggagctattgattacagcttctcggtgtcacttgttcaccaggatttaggtattgatgaggctgcgagtgaaaacaagctctttcccttgtgggctgctgcccagaagaacaaaggcgaagttggaaaaaatattcagccggtaccagaatcagagggattccatcattgactgaaaggccccttcatgttatttttgttggaaacaaatctatgggtttggaagttttatagcgtttgagaaaggggctgcataagtgatggattcacgtattggatgaattagatttcacagcatgaagatttcaatgcagctgtgatattatgagcttcttggttattgataaaaattacattttatgcagcacatgctttaaaggagagggcatagagggtacagatcctttgaaaatgtccttagggccccaataaatttcagcaggtttcattatcttaatagtctgaaacctgccaccaaaattcacacaaacagaagcagcgttccctatttctaacggtaaaaatagtgcctatttggtaagtcacctcttccccatcacagcatgctaaggtgaggaccggtcacagctgtcggggtcattgttattccgtgccatctgtcctggcctctgcattgatgtacaggaagagggagagggagacatgtttattttactcatttttataatttcatagctcattgagagggagagaagaaaaaccaaagctctgctgtgaaatctgctattaggtaggaaaattgaattggtgcctaaatgtttataaaactagattgaattaaatgcctacctctttatcagtcaaaaacgtgaattgtgtattatctaataatgccctcacagcaattattaatgggactgttgtatttgataaaaatcatcaatcagggtaaatattccatcctggagatttcctgtgactccttctggaagactgggattctcagctgttccagaacttggcagttactacacctcactctagtaaactcaatgttaaaaacagtcagccctccgccacctgcatgttcccatgtcatagtcgtcagaagcctcttagactgcgtcattggtgcacgttaccaaactcatcgtcaaattaggatgagctgtgtgatgtgccggaagccagagtcccaccttgcagccatgtcatctgctggcaccggctgtcaccccacaaggtcccacctcaacagtccacgtcaaggaggagaagtgtggtgcgtggagccatgcaggagagtggttagagccccttctttgccacttaacagctttatgaacttgggcacgagactccattcggccggaggctgagacaggcctggtggggccttgcggggtgatgggggccatagatggggtcgaagatgcagcagcatcaggcatgggcacacccgctcccaggggctttaagcaccttttccaaggggggctggggcttcccccacctccctcggggacgtgtgtagctgggccccacagagggccacacccaccaggtgaaatctgtggcaggtacatgtgtggcagtgacacaagctgcctgcaccaaaagcctcaggggatgcaaaagtagcagtcacctccccaggaagcagaggtgcccaagaaatagagcttggagatgctgggcacacgcccccagctgcttcctctaaaagctcacctgaccagtagctggttgctttgtccagttcactggctttggagggtggagcgtggggaagctgggcatgggcagaaatcatttctctgttgagctggggatacgctcagctggagagaaaaagaagagtggagtcggagtgatacccgggggtacccggagtgatacccggaggtagcctggacacgccccaaccttgggatcctgcagaaacagctgtttgttctcatcagggcaggatgctgggagcagggcagccatgtgtgagggcccagggagaggccccgggtctgcagcatccgtgtctgggccatctaggttgcggggatgaatgtgctgccctccagctcaggaggaagggaggaaggggggccaggcagtaagcgatcgttaggcatctcccatgtgccttctacgtgtcgtgccagctgagaaccttccagagcgagcttggtgcccttccccattcttctggagcctgccctggctcctgtggtcatgctcattggcagtttaccttcttcacggagcagccactgtgatgctttgcacgatgatgaggcatgtccccccacacgtcccccgagatgtcctggccccttagtggctgcccacccatacacctgctccccaggcgccaggagctacttagggatgaaggctgttgcctgggaggctctccagccaattctttctttagaaatctgtgcaagacttccccacatgctcctgggaagccattctggagcagatcttcacagtaactgcttgttgggaagcttaagcaaatggccctggagcccccagagcccccagagtcccctgcggtggccatgcaggctgtgtggccatccctgtctgcccaggcagagggggacaaccagagagatgcccatatgttactgccttgtctttcacctttctgagccagctgagaaatggatagcagacctcaagattttagctttattagggtaaaagcgagattgaaggcagggggtggggggccagtggcatggccatggtggcttcccagtaattcccacaagaattacattcgccatcactgtcccctctggctaagctctggcctccccagccaaggcaggggctgaccatctcagaagagatcagggcgccccgaaccctggggcaggcaggtcacctgcaggagccctaacagtgctaagctgggcatacccctctcttcctcccttgtcggtggtcagtgactcattctcccttgtgggtgtgagagtggaggaggccagcacctacatggaaaccagaggcaggggccacagcacctgcccccacccaccacaggtggctctcagagcttcagccagacagtggacccatggagctcctcctgtctacacagctcgggcaacgccaaaggaccaaagcagagtctccctgaggactgcactgaaggaggcgcccgcccctctggagggaacagggattcccttcccctggtgggactggccataaagaagcagttggtaggcaggatccggggcctgtgtatggctgcgtggttgtggtcctcactctggatcagcccctatcagcacagggcatcctgaggcaggggttggccaagtcctcctgtcaagggccagagagtaaatatgttaggcttggcaaagcagccacagccagtatggagaaaaaggcatggctgcgttccagtaaagcttcatttgcaaaagcaggtggtgggctgcgtgcgcccacagccacagttggccggccatgggctggagaggcccgtgcaggtacggtcttctctgatgcgtcctgtgatgcctgcgtggtacctggggagtgtttgagagcgtcacataccaccagaactcggaaacgtagttttcagttttgtaagcgaacgttgtatattactcaccggatgaaattaagttttctcctcccaaatcgtgggcctaaagcaattctctgaggatgccccacgtcacctcaggacactcgtccctcccccaacccgtgctgagacccccagggactcaagggcctcaggggaggggaagtccatgctgagacatagctgacacccacccatgccaacagcctgcccctggcacaggcccctgcttggtgggcacaggactcctgtcagtcagggccttggccttgaccccaaagacctcgttgtccagatccctgactgacagtggctgcccccctgtcttccaggtccccatcctcatcccgtgccacagagtggtctgcagcagcggagccgtgggcaactactccggaggactggccgtgaaggaatggcttctggcccatgaaggccaccggttggggaagccaggcttgggagggagctcaggtctggcaggggcctggctcaagggagcgggagctacctcgggctccccgcctgctggccgaaactgagtatgtgcagtaggatggatgtttgagcgacacacacgtgtaacactgcatcggatgcggggcgtggaggcaccgctgtattaaaggaagtggcagtgtcctgggaacaagcgtgtctgccctttctgtttccatattttacagcaggatgagttcagacgcccgcggtcctgcacacatttgtttccttctctaacgctgcccttgctctatttttcatgtccattaaaacaggccaagtgagtgtggaaggcctggctcatgttgggccacagcccaggatggggcagtctggcaccctcaggccacagacggctgccatagccgctgtccagggccagctaaggcccatcccaggccgtccacactagaaagctggccctgccccatccccaccatgcctcccttcctggctgtgtccatggctgtgatggcattctccactcagcagttcctagcatcccacacccaggtctcactgaaagaaaggggaacaggccatggcagtcagtgcttacagaggttttctagctttgtttcctacctgccaaaaaggctaatgcaagatgcatccacttatggtctgtatcaggtgaatagaaaataaccatttgccaagatttggaaagacagagagctctctggacacgggttcgatggagcttgcacctctctgagagctgaagtcaagtctcaccctctctccatactccctggcctagtgtgctctgggcagcaggtaggaagggacagggacctctcatctcaagggctgccccaaagggccctcagggaccatgggcctgttaggaccccagcaccccagtgtcgatcctggaagtcaaaggtcacgactgtggggggccagctcatgtcactgatggcagcaggcagggtttccagcatgggcggtgcgctgctgtctgatacttcattattgtgttgtcatcctagctgtataattaactatatccaaaagccggaagggaaacctgtagctctgcatatggagaaataaaacagagcatatgatgtatagagaaaatgaactgcacccagctgtgcactagagcgccatgttcttacccagcattccttgccacggtgtgaaccacagcagggaagctcgcatggttctacacgtcaccgaggcctggatgaaaatgtggcctcacgatgtgtatggttgggacccgccttctatttcattttatcttaacaccaacgaaagaaaaccgatttcagacgtttttcgctgatttatgatttattatatccctttctggcatcagccaaaatctcggtttttcctatgacatgaagtgatgtgactcttaccccgttgtcttaactcttggtatttttgaagcaggataagtcacacagcgggtcacgtagacacgtgctgttttgtgggacaggccctgggcctccttgctcctggcaggcctcaggtgccgcacgccgcgtcaccgtcaggactcgcaggctgtctggtcatttttgacgttgctgaaggtgagtgggaaaagctgggtgcactctgccccaaaggtggtgccctgtgtcccccacagatgatggccctccccagtgatggccggtcaccaggcacggctttcccctctgcatgaacagaacagaagcttctggctctccaaggcagcagcttggggcctggtggcccgggtgtgcgagccgcgagtgctttccaacagagggcaccagagccgtgcggtgtgctgtggagaccccagcaccacttcccctgctggaggatggatttgaaggagggtggctgggcggcaccccgatggctccctgtgctccctgagaccctacaggccgccctctgcagccacacctggaccggcaggcatgcacgctgcaggcaggctgcctccgctgtttgggtcccatgaacgatggaagcctcccagtgagatcttcaggtctctcatcaggcacaggctctgagggagggtcctggggccacatgactgcagccagcgagggccgagc

SEQ ID NO: 368 - DNA, 281656 bp, Homo sapiens
  source 1..281656: mol_type = genomic DNA
aaaattgtctatcacattctctagagaaggggccctttggaagctaaagacatgtctcctacatgactttacacatctaggtaaaaattaagaaaactaattgtctttatgtgtccaggtgtgatattcattcagcggacacttacgaagtacttttgatgccaagcattgtggtaggctatcgtagactttcctgaccagggttttatgctagaattgaaccctaatgctctgagcgtctttacccgtgatgaattattttccttcctttgcatgtaaaattgtatttttaatatatcattcttgggagaattgaggaaatagcattcaaatcatatctttgttctctgtggttcacatagcaaaccccagttaagaaagggctgcaagtctggaggataaaataacaagcaaaacatagcatttatcttctggagtggcactatccaatggaagtttctcagtgatagatgtgttctatatctgtgctgttcaacagagtggccaccagttgcatgtggctattgagaacttgcgatgtgagcaatgcaactgaggaactaaatttttacttttacttaatattaattaattgaaattgaaatagccacatatgatgagtggctaccttgttgaatggtgcagctctagaatctcatattcaaatatgagcacaacactggaagataaatgctaatacgaggtaagctcagaatgacatgaaagcgcctaggtggggaagctagtcttagcgctggtagaggttggggtgaaaactttccagagaaaatgacttctaggatgggatgtgaaggatgagggatggagtttggaaggtgtagtggagaaagtactaggtagaagctgaagtgtgtgagaaagcccagaagatagagggaacattaagaaaaggcaggtggatggcacgagcctagaatcacagaggggctgaagagttgatgagtccagagaggactgttggagccaggatcagggcatgaagggctttaggtgtcacgatatctcaagggcaatgggaagccagtgaagagtttgaagccatggaataatacaatcatattcgtggtttagagagatttccccggctgccccttggcagtgtggagaggaaaactggaggcatggtgctgtagtccaggtgagaaatgagtgttgttctttaatgcagtagcatagatggagagaagtagacatatttgaacaatggaaagagaaaaaaaatcaaaagattacctgagtgattgaccatggctggcggagatggaagagacaaggaccagaccttggtttctgacttggtagatgacagtaccttttatttaaaggtaacatgggatcctttagaagttgtctccacatttaaattttcctatcacattagctgacttgttcctcgtggatcttgaaactaactttgatatacactagtgaaaacaaataaattataagagcatgctttttcaagaaatcaacacaaattcacagttgatgcaacattgcttttattgggggttaggaacatatgacaaagtcacataaaatgtcaacaaagtcacactttgtgcttggctgctctttaaaaaaaaaaaaaaaccctgtttatttatgaactcactcaatgagaactatgtgagatgtggccaacaattatcatgcttaaaacaggacggccagagccatgaggagattgaagtctgacaatgctagctagctaagtggaaatttaccattgtcaaatatcagatacttccacacatttagatgtttgtccataagtagacccagcttagctgactcctttgagaaagaattgtgtctcaaacctctgttattcagctggccatattattaatcattactaaatgccagccacatgcaaaggggatggaaaagaagaatgagatttgctcagttttagctttctgtggctgaagtatttttgagtcagttacatggatacatgaggattatagtaggaaatgactgaatatttttaaaaacataagtactatggaaacagtcatgtataaacattcgtgcagaagcacttacaaacatacactgtgcataaagttggttaagaagatgcttgttagaaatgatttatgtaggtgaactaagaatttgaaataacttaataccattgaagacatcatacacatacaactttggacattatgcattcttctggggatgaaccattgacaacttctggacttcattgctagctattttttacattgaggtgggaaaccaaagaagtgcagaacagaagcaatctactaggcacaaagctccctggttactgcccagatagactgtttccactcatcaaattgaagtgcatacttaatttaggaagggcagaccagtgcaaaagctactgatagtgaactggagggcccggtttccatcccttactctgccacactccaaagttcgatcttctgtaagtcactctaaatttatggcctttagatttattgcctctattaaaaagggcattgcaacaagtgacttaaacctcccccttttttattctcaaggatttgggattttacatagacaaaagtgaacaatctcatcaaagtcttgcaaaaaaaaaaaaaaaaaacaagtctgaaatgctgataaacttcattccccattttttttcccaatttctatcatgaaaatacattctatcactccagcgtaattttaatcagaagactgaaaagttttaggtgattattaaatgaaatagctaattgtttgccatggaaaaatatcaaggaatataaaaaggggtaataattgtgacattgactacaatattgcaacttggcactatagatcatgagctttgcaactgcaatactgaatgtgagccctgtatatggcacttcggcaagttacttaaacctcagttttcttgcctgtaaaatggggataataatacctattttgcaaggctgttgaaaggcttaagtgagttaatatgtaaaatgcttaacagaactcaataaataccaattattattaggttaatggaaaaatcatagttctccatattgtcaccaatcacccttacttactttaaaggaagggaaatatgataataattctaagtaatacctggggtgagagacaggaggtgactgtgcagtcttttccagatatgtatagagagctgctgaatgtctgggtttaagtcaacaagatgtgtgtattcatttcctcctccaattacaaccacctaaagaactccattttctccttcctttccatttatctaaatcttccacatcactcaaggttcatctcatattttcctgttttataactttcttccctaagtaagtcagttttgccaacttgatggcaaactcccctgaactcatcttttgcttggttttgtttttgatcttatcctctactgactctatctgttacttatctttgcaaacatttctataactttttctaactagatttaaactctttagaagcagtgattttatctgatagaatctagctttcttgattaaaaaaaaatgatcgattggttagtgtcaagtggaccaatgtggtactatgattattttaccctttgaatagcctctgactactttattttaaaagtacttttattctgtaggtcactctcaagatccaaccctatgtgtggctaaaaatcattctccttgtaggattcattttgtttcttaaaatattaacacatttgtgcaatttgggattttgaaacaagtgcattaataagcatatccatactaggaaaaaaatgaatgtcacatgaatttaagtacaaacagaggaatacacatgaggaagggaaagttcttggctcatgaaaatctagatgtcattattgagtttttctgtttcttgaaaagattgtctcttgttctgagagttctagtggcagaagctgcacaatttgggggtgtttcttagcagaggaggtgtcttcaggtgatcactttctttgtttcaacttcatagttggcttgagagtccatcaatatagcagtctcttcagtctttgtccttgcactggggagacattcctgaggaggggtactataggaccagctgaaaggaacatcaacacaactaaaaaaataacagaacatgtcacagaaagttatcacattgactctttaataataataaataaatgtaatgatactttggggaccatgctaagtctcactagagatgaaatgctgcatcactagaaaaatgctgttgttttacattgttccccttgctaaagaatcagtcagcaatggcattgcctgagtgtgtgtgagacaccactctaatggctctgggagaaaatgctgtgtaagaaaagcttcaggtttatccaacagggaacttactaaaatgggacacatagggaaagaacaaaagaacacatgacattgaggacagattcaaataaatccaaggagtgaaaacaaagtaagatagctgtgggtacataactgcttaggaatgcagggctgaatgaagtcactagaattgttaggtgttgtcaattccttgtatttgtctttgtattcccagcgcatggcacagaacatggtatggaaagaaaaaaagaaaaaaaaaagaaagagggaaagacggaaagatggaaggaaggaatgaaggaaggaagaaggaaaaagaagaacgaaaaagaaaggaaggaaagaaagagagaaagaaagaaaagaaagaaaaagagagaggaagggggaaaggagaaaaaccgagaaggatggagggaaggagagaaataaagaagaaggttttcaaagtgtagaagaggtggggggacagattatgcagaaaggaaaagcatatcctggagcatattcaatgacttagaagccagagaaagcaggctcacttaattcaagaagagattacacattctgagtggttttagaaaatggggtagggcaatttccaggtggctttgaacacgttaagatttaatttgggaagtatgatgtgttactgtaactattgtaggcttctgagaggaatattaagatgactcaaatgaatcaagtggaaggaaaaacgtgaaactcaaaggagttaatccaatggaaaaaaacgaaccatactgcaagaaattaaatgaaggcaggcctaaagaatatagtcttaaaatagaaaggcaggtgcttgtcggggtttcttctatgttaatgttaattgagagaaatgggcttagaactcagatcaagaatttgcttctcccactgtgtagcttttttcattcttcagctgttcttcttttctgctactgccccttcctgaaagtgaactccagtccttactgttttagcatcaacgcaaaatatgttagtaaatacagaacgtggaggtggaatcaaatataactttgaaggacgactgttggaacaaatgagctccagatccaccggttctggagttgttcctatgcctccatactttagaataccttcaaaaattcttaaagctgtaaaagaatttagagcccaactaatccaacccatgcattttaaagataagggtatttgagaagagttgttattaatgtttctctttttttataaaagttgttatgaataaaatatacttctcaggtagatgtttctttaactgaagaccttatcatcagcctcttcatcatgcttacacaatgaagatgtctaataagtcaggcacaccaaaaggggtacactatgacacatcactgctttctgccctaaacacttttgatacaccgaggatgctggctccctagatggcaggtataatatgttttttaatctgtaaagtaactaagtgttaaacgttaataggtatttttctgattaagcatgcaataactgatcttggatgagtaattaaatatacatcttaaagattttagaatttattattttgtgaacattgacagggatgatggggtgctaagcttttgatactcatttgtaaaactcattttttaataaattaaaatattatgtattaaggaataacattttgcacaattttttatggctcatttggatatctaatgatggcaaatccttgaatacatgagcaggtgaaaagtaaaccttgtattgctttggtattaggtagctatacatcacgcaaaatgtctctttctaatagggactccatcattaaaacaaattttgagaaacagatagtataaatatgtgaatgaccatattctaggtgtctactatgagtcaactgttctacaaatcagctttctttgggctctatgcctactcaattgcaatgagtcatatcttgtatctcaatataagcctcccttggaatcctttttgtctcccaaacacataagcataaatcgagacccttgtattgccttgcccggggtccttctgtgacctgatggtaatgattctccaaatttgcatcaagagcctcttcacctactgagccaactaccaggctgaccagccaactcgctgttgctctgactgggctattccttaataggtagatcttcagggatcagttccctggaaggaggctctccagtggggccatcagtagaccttggacatcatgtcaagacgttaaaagggaagttgatgttagtgcacaaataacctaaggcagagtttcagtattcaacatgtgccatgcaaaacagtgaaaaacaataaaagaaattgctgattattgttattgttttgattactttggttaaattaaaattattatctctgcctaaggtcatttccctggcattctattttgttattccaacaaaggaactaatattctcaattacttcaagttgtctaaagtcagaaaaagactaaatcaatcaagagtagcaaatattttacaaattaagcaagtgtccacaatgataaccctttcagagataattaatttccaacatctaggtcgcacatatttattcttgcataagaacacagatcgtagagtcctcgtatccctatattaattaacaaagaatttttttaaaataagcttattttaaaaagattctactcaggaaccatttcaatgatgagaaatgcacaagaaaagaaaaaaactcaagtaggcaacatgtaaagcaacagacaactatatgcacattagtataattacacattgcaaattatatcggatgtatctaatatctaattttttgaaagctgattccacttgagacttcaataacagcatcaacattttgcaggtggctccttctgtatagtatccaaagggaattattcctctaatgtgcttacaaccctcaagtaaaagctaaagctctctcttaaaggaccaatgaacaatgaacactaggaatattaccttgataaaggaaggggggagggtttcaccatacataatattcagcacggttatttattctcttccttctgtgcccatgatatttatttgcttcaagcaataagaaacaaacttaaacaggagactcattagaaaatgtgaacgaggctacatctatattttgaggcagcgatataagaagctaagggttgataatttcttagatcactcgataatagagaaatgttcaacagaatggcaggttatatctttgactgaaaacagaaagccctacattaaattcagcacttctaaaacataggattaatttgtcctaaagaggacaccagatcaaagctctgctttgagaaacaggcttttgtcctcatctttctatatgagttaatcaatcatcaaataaccaaaataaatttgtgatcttggagaacgaagcatattattcaaggtgattggatccattttcttgattcctccttcaagatctttcggctaattagtcagggttactatagaattatttaattatctgcacttttgtgcaataaaatatgttgtcatatcacatactttatcatgctgttgcagttcacacttaatgatgcctctatagttagctgtttcctttgttctgctcagtaagtggttttagaaagagggtgggccgggaaggtggagccctggggtttgtaaaataaaatcatatattcctggtctacatgccaaactttatgcatttaaatgaatttcttcttagaaattaagtggcaattccattcgtaataagctaagaggcacaggtcggtgacttggaatgcaaccgcaacagtgttactataccttgaacatctctctagtgcatttccactgcagtgcaatggtaaaacgacgatttaattttttttttttttttctaatcagcaaggaatgtctttaacaaggaagaagtaaattatgataattactctgaatggtcggatccttgagcattactaattagcatttattgcctggattatagaacaatacatgtgaaaccgaactgcgattgctcttttacgttgaagacttgaaaaggcaatggagcaaaaagccagcatcatcggtagtgtagtcagtagtttacatctccttgataggacgcagaacccctcactttggaaacacgcaaatatggtcctcagtatttatggcccattcattttttttttgttagtcacatatttacataagatatcatagtcatggtagactaatgagaggagaagcattttggttatgtcatttcgggataattttatcagttgtgagagtttaacaataaagaacataaaacttgctgtttcataaaaatatgaaattttcctggagaaattttgacttaataaaggaacaaagaactcagtttgtagtgaataaaattttacattcacttccccactttctcatagaagatctacagttggggataaccgataagaggcaattggtttctggcttaagagcctttttcattaggaattttcggtaaattaaagtctgaaattagaaaaacattagacattaatcaacagaccaacaccagtcacgtaaataaatggcattcgtataatttggcagctgaaattcttaaataatctggcaggtacaaggagagaaagaggaaaaatgaaccgttcatcattctcactgcggtctcaccgtttccctccacaccccattacagcgaatgaagagaaagaacatcgtaaaatataaagccggtactaaatacagtcactagtcttccaataccttccatggattccccaccctgatcctttctagtttgaaagaataactttgactaaatctgtgaggagataaaacaggctggtgataaaaattaattctgctgaatgagcaaatgcatttggattgcagagatgcaaataagataatacttttcttttcctttgacataccaagaggattactttagaatgttaaatttgattttattagaatatattagcagtgttttaattaataccaatcaaacattttctttccctgaggcttgatgtgttcctcgctttctaaatcatctgtctttttttcatcaaaaagcccctctaccaaattaccaaagcctttgttacattctttataattttactgtattcaatggaaaattatgagctctttacctaaaggtgtcttgcctatagtaatatattcccaggttctagatttaaaatgaatactgttcattagtacacatattttttaaaggtagaattagagacttgaaaagaaatatcttctgtatttttcttttggggaaaaatgttgcaaaaggaattttggctggttcatattatttggcttttattctcactagagcttcctagagctgttaaattccaactgccttggttttgagctggcatttctttggaaacagaggcaaaaaaggaatttttaaaaaggaggtggggagagaaactagttaaaaatacggtgagccagtgtgccctgtgaactgaattgtaactgtgtgttccaaggaggtgctgcattgcatttcactcattatcctctccttttctctcaagcttcctgtccttctgtgtccgaaagctccagttcacttctttctcttttcttcccgcaacgcacccccgccccagttccccgccttatttttttttttttaatctgccaagctggatttgcacttttaaagatcagtatcaataatgccctgcttgtttcggttgcactctccctttaaaagacagccccctctaattgatgcgtctgggctagtctagactggtagtgattgaaccaaccaccaattatgttattcatttcactgaacttcactgatgggctcggtgaggaagaaggggtgttgagaaacctgcccttgactgaagcagttgcctgctgaaatataaaatcttgtgtcgttatgcacttttaaatgcctgggtgatcagttgtatgatagcaacctcggaacatgagcaatccacttgaaaacatgtaaaaacctgagagtgccttgaaatacaaattaaaacacttgtattaaattactaccctgttatcactgaaaatcacggaagaattttacctggcatgtttttattgatccatgtatacattttcatagagtaaactgcagatatattttaacttcaaaaagcaccaactgttttacaaatgttggatatgaataatgtggtaatatagattcataagttaaatagatgccttgctataatttccaaatacctatgcatacacatcagctaaggtaggggaagtcattaaaccattgaatataaactaacgatgactcgacaatcaaataactattttttttgaagcacattcggactatcaaagactggaaagtaatattctaatattactacacaagaggtttcaacaaaagacgtggtgcaatcgttgcatagttcatattctcagttcaattttctgatacaaaatggtttcttgattgcaatttggcattaatgactaaaattgcaataaacacttaaaataaaaaacaataacaggcaaagaacagtttccctaaccttcaattacatgtataaaacaaggctacaaccaatataaagtctttagaagaagaaagcatttggattggggttgatttaggtgtttttcaaacatagaagagaaatgttggcccaataatacgaaaattgtttaaatgatattttatactagaatttttcacaacaaaggaaaggtaagttactgtttctcttccccaactacgagacagccctaaatcactgaaatgattcagttataaaaagttacagctcaagaaaactacaaactaggtaatgctagccattaccttaagaaaggataattttaaatgtacagtttgggtgttataaaaccttttttggattgaatttaagtactgataaaattttccttagttttaaaatgaaaaccagtatttgttactcccaaagaatacgataattgtgtttgctgttgctgttgctttcattttacatatttagaagatttatttccaatctttatcacctttatatccataaagtataacattttgtaaaagataccaagcaaggaggtggtatccctccttttatttttaaaaaatcttgcaaagtcatacaaacttaatttttattaataccataacttccatcctttgtgtggaattgcaagaatagaattttaacctattaatattttactccaaactattagtttgcctttatctgcgtctgtatgttcactgtctagccatccatgatacacatgtgtggacactgaatatataatatattcacatgcccattttaattgggcacaattttaagattaactgtggagtttgaaagttggagacatggggcatgctgggacttcagctgagatgttctgaggtcaagcaccaggtactgagctgttcttgttacgctcgtatactactgcgtgttgctctcaaggaatagaccaggcagatgagttccacaagcctcaggcatcaataacatgcatacatacacatagcagccaacacgctattaaagcaaaatatatacctactttaacagaaatccaggagctgccactctctggtcacctgatcccatctaacaatgaaaacctcagaggtatactcaatcacctcagacaaactttcttttcttttgtttttgctttaaagaataaaattccaccaaatttccaggatgcaaaagcacgactcgcagctcccaagagcctaacccgtggatttaaacggtaaacatcacaagttagggtctcagggactgagaggagcgcaacaatgttttctttcttgagacaaagcaaagcaaaacaagaatgacaggcaatttctgttcgaggttcataactaagatgcaacaaacaggtggtatggtatttcttctctaagctcctttccttcacaaaattgagattccgtttaagcctaatacatatatacacacatacgcagtatctgggggcgcatatacaatcacgcacatacacatacgatcacgagtacatcagagaaaactctttcaagatttgggcaaaatagttcactaaaacggaaaataatatgcacagactcagaaatgcccaagtttttaaaaccatagtctacaataaggatttagtgtcttttcaaagctttaatttacgactagcacaaatgactgaagagaaaataggaggcatctctttcccccagggcaagtatgccgcatgcaaaaatcatagaaatcgggttttcaaaggagaagaccaagaagtaggattcggaggctatagaagtgtaaagacgaatagcgttctgaactcacccattcgaagcggagcggggcccgcacagcctcctgtggcaccatcccgagcaaggggggaaaatgagagctctcagtgcgctaggctgggcgaggtgtttcaatagaggacggagaacgggggcggggaggggaggcgggggcaggaagcgatacaccaaatctcgagactgtaactctgtagcttatgctttgacgagagaaaaaagggcagttgggtgggagtggagggaggggctggaactgatcaaatttggaaaatattcacttaaaaattaaaaaaaggcggggggggggggggagtatgaaacctccccagagctgctttttgaaaaatttcttccttctttctttagcgtgcactttgccagtcctgcaaacggaggcttcgtctgcatcagctgcttggctgaagtcaaggccaaatcaccaagagcgagcaccaggctgtcatttggtagacacgaagtgggaagggctgggtgcgggctggggagagacattccccccgcacctcccgctgcggattctttgaagcctttggccaatatttcagaggaatccgaagcataattcccctccatcttcgcagacagcccctggttctgtacctgatagattgtcgctttcctcatcagactggaagtggggctttcctgtgccgccaccaaaaatgaaaggaaaaggaggggaggcagatgggaagatgacccttttacaaatgtttcttctcctttttctttctgtttttcatttcatttctttcttcttcttgttcttcttttattccaggcctgagcaaggtagatggctggctagtcaaagagaatgacaaagcagccacagccaggaggacactggagaggcctcaacgcacttagtaaaaatgctaaatatttttttagatatttccatatgcaactaaaaacagttagagctctagactctccccctcccctcctttaaaaatggaatcatactagcaacacagctaaattatgtctcttctccctctgtacagtgtctgtttagcagcccccccacccccaccttcaagacaacttttttctcacctctgtgggttcttctcaggcacaatcctccgttgagctcagaggctctcctttttctctcccttcccttttccttttcctctcagaaaagctagtctgtcatcatcacacctagcttctctctcgctcgctcaacctctctccttttctcttttaccattaaaatataataataataatggccctttcgacatagcagcatgaagtggctgcctttgagaagcacatttaatctttactggctcccctaggcttcagtgaagaaggagaaggcaaggaaaaaaaaaggagagagagaaaaaaagattgtaagggaggctgctgacggacagcaggcatcaggcacaaatcagcgacaagttgaattttcctagaccacactgccccctttcttctcggcttgctccctgggctcctggaaagcctgagtgtctggttacaggaggcaacgggtctctttttgccaaccatggtgcagattcctcgcatgcctgcttaaatctctggcagaataagaaatcaatatccccctctaatcacctttagctcttcgatggcttccccccttttctgagaatccacttggctctcctcgccgctcccccgccctgccgggctcctacatacaaagcttgcagccctgtcatttctcacttccttccatatcttggagacaagcctctcttctaatatcctctcgcgcttgctccctctcctgttgtagtgtgtctcatccctgacttgcagtgctggatgcactaaggcatctccctgactactaatgaggccaaaaatacatcagcaggtcagggggaaggccagacactgcattatacaaatacaaaaaatttctcagcccgcaagacctagagatcaggtatcacattttcgaaaaggaaaaacagggagggaaagaagtgaggaagggagaccacagtgcagttctctgcctaactgtttcacatcctaggggaatttcaagcacacatgcatgtatgagtgcaggtgatggattttgtgaatcttggtggcctttctttatggacggaaagtcaacaatgcccaaatatttctttgcaatcagcatttagcgggataaaagagcaatgattcggatctacatttaagatatgtagactctctgttcaggcatgtgatgactacagagctaaaattccctttccttccagtggctggggtttgctcgttgactgtatttgccatatgtattaatttaccatctatgtgcccttggattttgaaatgaactcatcagtcactgaagctcatcctgaccctttgctttcactgcaggcattttccttattcctgaagcatgtttttcctcttcaaatgtctgacagacacatatacacttcatcgatcagcctcaagttccccaataatgacaagtaatatttcagatgacaaaaaaaaagaggcacaagaaaaaaggaagacatcctaagttgattgggggagcatctcctctcatttctgttggcactcatttttaaagctctgctctgctgtgatcctttaaggcatggatctgccgaaaattagggtctctacctatctatgtacacagtgggtatgttaccgttctaacccaattttcctgcctagaatcatgcagacaaccggcagcgtggtattaaatataatgtcagattctgtaaatagcaaggaaagggagaaaggtatctgaggatgcaggtttcctccaagtcaatatttttaaaagatagtttctttgtgctcaactcagacataattgtgctttgtctctgactgtgagacctgcagaagcatacctagatgccaaggaaaaggagaaaatgcacaaataagaagaagatacagacagaggaagaagggagaggagagaagtagagaggaaaggcgaggagcgcataacagctaaaggcaaaatgagagtgttggatttttgtaatactttttttttctttttgtcgttattgggaaggagaaagaggtggttgccaggagttggtgactaggttagaatctttttcagatttggctaacggggtgttttcactagactgatggagaaaaaagaaacacgctagaataatcatgaagggtggagctgttaaaaaaaaaagtctttgactcactgggtgcctccctgtacaccaaaatgaatcattcctaaccagaatcatcaattgtcttagtgtacttctatatgaaggccagattatgggaatcatgtcattgcacccatcttcaaaacgaagggtaaatagaggacgagatttcccgagactcttttaaacctctctatatttgcaacaatagttcagcatgattttcacataataagctaatttgctcttgcttgtattcactctgcttacaaagatatacaaatatatagcttatgaaagttttgctatgaacacatcattttctctatacaactcagcgatgtctttggaggatacttatttcaagcagttaacacctgaccccaatttctgtgggtaattagtgagctagataaccacacaaagtgggtaattatttagtacccaagggtacgctagaagtgggtagtggctttgttaacaaaagcacatctctaattgttgtatctatgatgggtgttttaaaaataccagttactatatcaagtgaaccatgataaataagtgaactagtttgctgtccttagcatatacatatgtatcttctatcgtgggtaataatatttacctctcttgtatggagtgttgtgaagattaattagttaacatctgtaagactctcagaagatgaaatattgctagaggccttctaaatactgtattattattgttattattaccttggctaaaaatcccagaatgggagaaatggagaaggtaaatgttattgtctggtctatgtctaagtttgcaaatatgctgagatcacaaacataatgagtttgattatggggagtagtttcctacctgacagagtctaacccacactgtaatagaaaagaaaggcagaaggtatttcattgacagctggctctggttggatctgaggaactgaactgggatagaagtggagaggaaagggaggagcaggaagaaggagtcactgatgggctgggaggaagccgaaatctgctggaccacaccctccttccaaagtctttctatccttctctctcacaagcagcaaataagcacaaaaacccccaaagaagatatctatgcaagtcctgggacaaattcagcataatgacaatctatctgccagttacatagcattgattctggaggagaaccatcagcacaaattattataacaaatgcacgtacatttgaaaatattacaatgttgagaataggcacacacagatcaacctcagataactttaacccaggttatgagcagcgatgaagaagcaactttttaattgcttttatgactcactctcgggggagaagggggtattattaatttttgccaagaaagaaagaaaataaaaaagaaaggaaagaagaaaaaaaaggaaaagaaaatcccatgctttcagggacctaattctggagaacaaccaagccttgaaaacaaacaacaacaacaacaaaaacttactgctgctttctctgtaaattgcccatctccttgagctggctgtctggctctggctgaggcaggacagacagaggcctcttggaatccaaatcttcaagtaggctcaccacattttttctttcaaagcaaggttgtcctggggattaaccctaggagtctgggagatgcaagcatgtggggagggtgaagaaaaagacgcaaagatgttgtattcagtccagttgacggcttccagggaatggaaaaaggaaaggaccccatgagccagccaacaggtaccactgccgaaatctctgctggaggatggcctttggaacacgtgcttatgctgtgattggaggccagtggtgtgatgagcaccttttaagagtttgggagcagagggaaaatttctccaaaagccacccaagccaggcttctgacctgaagcccagtatgtgtcaccccctctctgagctcagaactacaaaggctgactggcattctccaacccgcccagctcctttcaaacccacagactgtgccagactggccccacctcccactgcagcaaatgctgtagccccgctccatgctgtgttgtaaggagccagacttccgttttaattgtcctacctggccgtcccctctgccactacccctggctcttggttcctggcatggtttcaaaggcccaatcaatggctttccctcccccatcggaatcttaaacactgctagttctcccttttccaaattttatctctttcaaacttaaatgtttttatgtcttgtactttgtttcatgtctagccaccaccacctcgtttctttggccactctcattctcttgtttgacacttttttttgccatgtcttttctcatattaggactgaaaacccaaaccaaaagtcagctgctagcatctttcccttatcctcccctgcattatatttaatgtatctgacaatccaatggatctcaaggcatgtcctaaaatctcacctaaaaagagttgaagccagcagagagcaggtgtgtatgtgtgtgttaaataacctaactatgtgaatgtagcaggaaagggcctgatgcatgtgggtggaaggaagaacagaagaaaggaatctggtatacttaaaaacatttaggataaaagcaatgaaagctaattgtggcaagaacttacggagaaaataccatacacaaacacacatacacacacacgcatgcacacacacacatatctgtatcaagcatccatgctgagcagttaagtcacaataccctaagattatctgattatctgaaaaagtatttaccatactgtgaatgggacaggcagggccacatggttctgcagctgaaagctaaatacaaaagccttctggaatggattggaagaggatggcaaactcctttaaatcatctgcctccctccacccttgtctgggcttaggggttaagaactgctatagcacctctcttttatttccatcatgattttaagcttattattgctattcattctttaaaatatttgtgcccttaaccttactacttagatattcatggctttcatgttgcaagtccgctgtctgtgacacttctaatacatatcattgaaggtcttctctgtgtcagacacaggtaactaatatctcatttggtccccaaaacagcctttaaaaggtatcatcagtattttacagatgcagaaaataaggtttgaaatagttagaattgcccagctcacgggtggcacggctaggatttgaactcaggtctaattcatggtctttcctttgcatcaatatactctttgactcctgtcccagtgtaaatgtcactttctgcagctagtctcctcaaactagtttagtttcttctcctatgtattttccatagcaccctatacttacactatcttagcgttcattcattcttttcattttgctgattttatctagtctgtctaacagtgggaaaacagagagagaaagagagacagagggaaagagagaccattcccctccctaaggtaagatgcctattacctgtgtactaagcggatctagtacataattactgactacttaactctatgtcagacactgtgctggacagtgaaatttctttagccggagggcaggaagtgatgctgtagtactggcatcgtctgtgtactttgctactccatctcccaactctaaggtcacaaagacagaggctgtgacaaggtctctctgtatccacagtacatggcatagcacctgttacacagcaggagctcaacaaatcatttcagaatacatttttatgctaagatggctttgattgtaacattttgagaaagcaatattcatgcctaaataacccttaaaaaggcttaataaaatgccacataaacgtggcatttaataaatggtggactgcaaccttattttctaagactgtactctggctgaggtcccacttatagtcatgtttgtgtttctgaaaactagaaaattggtctgtttaattcatcctatacgttctgaagtcatgctgtttctgtttcaagccagttaagctctgtctgaaatctctccaatcggtagagcaggaggtcatgtcaagtgataaactgtccagggtggcgtggctgtgaaggactattttgggctacatgtgaggagggagagctcttacactttagagtgtgtggctaaatccagatctgagataagcaacacagctcagggtgccctcatttcagaaaaagaggttgagaagatagaaatggttcatgatcatatgacctaaatgactctagggtttcataatgtatattctgaggaaagattaggcaattctttattttgcctaaggaaagaatatttaagtatgtataatggctacccttggcaggccagcttctatcctattctttatctgagcagttcttgtctccgaatagagttaagccggggaatatcatggactccattctgttttccattagcattgactgacttttgttacaaatatgttactatctgtactaggctgggataatattcattatgttaacctagaacacagtttctaaaactgtatcctttggggcattgctggcatttctcaaggcaaagctggatgggtacacatcattctactctaaatgtacttaagataaagacgatctaaattccctcagcaagagtctttcactaactggcaaaaatatttcttactactcatcataggaagaggaagaggaagaggaagaggaagaggaagtggaagttagtcctgttggtcagtaaagcccttttcctaaagcaatgaggctctagaccagtagggggcagtgtttggtacaggcactctatagctcaagtggtctcaaagggaatcatctggcagattttatacccgaaatccacatcgtctccaagtgtcaggctaagtagtgtcaggcaaaatacttggatttttgcctagttaaaaaaatgctttcattagtatcttaggatattaggggaaaaatcaatgctgagctaatccttcagtatatatttagtgatatttattgatatgaatatataaaataattctgttgcctccttgtacctcattggttgagtttcagaggacttttcctggcttccatcctaactccatagaagagctggtgcttatctgatgggcccaggtggtttgtgaagctctctggaaggtaatctatggccaattgattgcattggggcccaactctaccaatttgtaggaagtacattttagcagcctttgggttttaggaaggtgaaggagaaaagcttctgtctaacaatgggaaaacagagagagaaagagagacagagggaaagagagaccattcccctccctaaggtgagatgcctattacctgtgcactaagcggattgagtctgacattataaaagtcattattcttggctagaggatgtcatctaagagccaaatgctatttcagtctaggttccctgccattcagtcattaggtttaggctggcaagcaaagagggatatttttcgcccctggaacttttgaagattgcgattgtaaggccaagaacctagagatgatattcaagcaaggatacagaccagggatttgttctggagttgtttgtattgttttgaaactgctacagatagcctggtggttgggagggaaagaaaagaggtggaggaagagtaaagagacatcttactgatgcctaggaaccatggcattaataggactggatttgagactgttctcatctcaaatcagtcttactgatgccatggttcctagggatatctttgctgaccaaattaatgctcttttgaagatagggctccttttgtagtactccccacctctggatctctaagtattttccaatacataggcaagaagtagatagggcaatgactcaccactaagtagaattagattgtcttaggttggtgcaaaattaattgtggtttttaccataaaaatttgtggtaaatttttataacttttgcaccaaattttataactttataactttgcaccaaacctagtaattcagatttcagggtttccagtcatactcccaatattgctgttcaactttttattaatgttcaaaaagtcacacttctttactttcagacttcagatttttacattttttaagctactaagattctaaaggtttaggataaggagagggagaagcaaatatttttatatcatgattcctgtttcatagttgggaactgaggcaattaatgactaaatacttttcctaagaaggttgttatagcaccaagaatataatctaggtctttcattcaatctagccgttgtgaggaaaaatgagctaatatgtatgaactgcctcaacatcattcaaagagtgggtttgtgtaaatctgaggtgttgttaataataatcataccctgtgcatcttgcttaccccataattaactgatgacagcgcagaaaggaagagcttcaacaagatgcgattagtttacctgagcatttgtaaaatagataagtgtgtcaaaagtgctgagtgtgcagaagtaaaattaaaggaatacagaaacatattttgagacatatttttgggtccaaggtgcaacagtagtatcagaattcccactgagatttaaacagagagcaatgagtagggggcactctggagaagccaagaaatattttaaaggtggaaactgctacctcagagactttaaattcggcgcattctacacttctcaaggagtctccctgccacaaatagcagtgacatgaataccacaggaactatgtcgaagggagccaggctcaccttctggggtctgctgctttccccttcgtgaaaatccatcgcatgttccaatccaggtcagcactgagcaaaccaactacagtttgcaaccaacctgcactccaaagtctgggggaggtaggtaaatatttttcacattcttaagcctttatttttggtcttaatttttattttgagtcagaatcttgttctgttacccaggttggagtgcagcggcatgatcatggctcactgcagccacaaactccctggctcacgcaatcctcctgcctcagcctgccaagtagctgggactataggcatgcgccaccatgctcagcgaatgtttttactttttgtagagatagggtctcactactttgcccaggctggtcttaaacccctggcctcatactatcttaaggtcttggcctcctaaattgctgggattaccagtgcgagccaccgcacccagccaagcctttaaacattcactgtgatattatgactacctagcccagttctggactgtttgatttacgggcttatgggtctatatgcttaactgtgcatgatacttacacgtactgaatgaggacatgtgttcattttgatgctactaatgcttaccactatgtctgctgcataataggtgatttacaaatgattgtttattctgcactcttctggaaatttaatataatctaggttgtagcattatggagcacagaccaatcaacagattgaactcacaaaaggaatctttaattgatgatttgcctttcctgtcatgaattgaattactcaaaatacacatcttataatttatggaaaagtaagaaaagttccaaggtaagaaaggaaaaaacatactttgaaaataaaaagaacatctggttgttgtttagattctgtttagaatgtgaacagtgatttgggtgcttctaataaatagttaggagtctacctgtcaatgtcttttaacgttatttttattccttttagagatgaggtctcactgcccaggtctgagtgcagtggcatgatcccagctcactgcagcctcgaactcctgggctcaagtgatcctcctgcctcagtctcctaagtagctgggactacaggtgagcaccatcatgtctgtctcttaatgcgtttttaaaaacaaaggaaacagataaaacagattggagaaccaaactacaggaggaaataactgatgaccagcatgttcacttcaattactcgacatatgcatatatctctgagccccagtgccttgctttccacagagcagtaagaattatttgaagtaccggtaaattagccttgttaaggaaattcatgaagaactggtgaagtagctagtctggcggtgggcatggaagggagggaagaattcgacatgttatttctcttctgctaaaaacagggagtgtttgggaggccaaggcgggtggatcacctgaggtcaggagttcgagaccagcctggccatcatggcaaaaccccgtctctactaaaaaatacaaaaattagctgggtgcgatggcaggtgcctataatcccacctactcgggaggctgaggcaggagaatcgcttgaacctggaaggcggaggttacagtgagccgagattgtgccactgcactccagcctggcagacagagcaagattctgtctcaaacaaaacaaaacaaaacaaaaacaacaacaaccaaaaaaaaaaaaaaaacagggagcgcttaacctagaaaataccaatgcataaaatgaacttctctgccctgataataaagggggcaggggaataaaagcagaagaattatcacatgatctactcagtattttttgactgctttcagtgatctcagtctccccttcctcagcaccccgtcagcactgtaagcacaccatgcacaggacatgttgcactatgattgtaattaagacacggagagatatatctccctatatctctagcccattatagaatgactggcacacagtaagctctcagtaaatatggaatataaaatgagtgggtcaatgtgaagataaaatttaagagctataagatgaagtgcaagcacaaccatgtccaaaataaggaaaagtgagagctcaattagatctagattctgggctgggtctaatgggacaggaaggggtaaaaaagagtgttcagtatgaatcttccatccttcatgaagatgctaaagtcctgacactgagttatgcacacagagttggaatctggccctggggaaaaccaaaggctgacatatccttgtctggtctgcttacttcgacttcattttctatttctggttatagtggtcccaagacacacgacccaatggaaggaatatagaactgcaagttaagagacataggttctccacttagctttgtcacagtgaccttggacaagacatttcacctctcagatccttagctgcctcaactataaaatgagaggattacactagatgaactttcaagttccctccagggaaattctagaattgcatagttcctctctctgtctagattccattctcttacaagaatattttcttaacagctacgatttagatggaatttggatttagaaaataaatacagcatcttagctgatgttgaagaaaaaatagagtctgaatatacacaatgggagaagggagatgtgaagagtctcagcacagtgaaattcatcatagcagattgggtcatgaaaaggggattcccatttagctatctacacatctcccgatgcttgatgaaaccaagaaaatttgacaaggtttttgggcaacaagaaagcatgttgttgtgaagggacaagaattattcatcccatttcatagaaaggaaaactgaagcccaggaaagatagataactcattcaagaccacactgtgatggcgaagccaacttcccacccaattatgttgtctgaatttgtcaacaaagaaatcaccactgcttccaatgagcatggtgccacagcccaataaaactgggcagccccagagccagcttcagtctcatgacctctgctgcaatcagacctgctcaaaatttctgtaatgtttattgctagaaaaagtaactgcatgaatgacccatagaggctctttagaagatttcctgcggtcaagatgctttcgctggccttgggtcaagaaatccggtttccattccattgtctgtcacttgaggctcttgcatattaatttccttctctagtcatcaaaaaacttttgagagaaacttataaaatgtaaaacgatcccagatcaatatatatgaaatattattcgaagagttttgtctggcgttaccaattatctgaagaaattattcttatctactttttaaatcacacaaagacacacacgcacacacatatataatacatataatttatatttaaatgtttataatagtgtatatacacacacatagacactgttcttataaaaattatatatatgtgtatgtgtatgtataatgtgtatgtgtgtatatatatgtctatatgtatatgatagataagtatgtatttatatctcttccagtctagctgggaaatctgtttcacaatcaactgctgctctgttctcggacttgatatatagccaagcaagccattctcgattaacactgctccctcctggggaaagtcacagaataactttattgatttctctttacccttctccacatttctctgctgaaatgttgtcttaactcttcaatgcaaaagcaaaaggaagtgaaaatgaaaataaagagctttgcttctttagggcaatgttaattatatttttcttacttcctaaacaaaattttcttcaaacaacagcatatccatgaaggatctctatatggtaaagaaaagagaggatgacatacttcccatggtttctagacagcagatttctttacgctgaaacctgtgcttcacccacaatgctggactcagaactacacgaacctaagcgtattctcttatgatttggccagccatctttgagaaccgctaagacaatttggcaaacagtccttccactgttttccaacacactagaatataaggaaagtttgtttcttgtcagttttttctacctcaaaagatcccaggcatgattaagtttttgccttttctttctctttctcttttctttcttctacagaaaattctttactttaacagcttcaggatcactgatgcaatttaggagtttctccgatgcaattgagaaatgcaaaagggaggttctataggcagggtcttttctgcctggagcttttaagatcactgaggaaaaataactcagattctcactctttctctcctcccagcttctgagctgccctgcgggctcagttctcactgtgggtaggtatgggtcagggtagtggaaagaaagcagagaaggggacactagaatagcttaaagtaaaagctctgaaacaccttttccatttccttttccttttttccccacagatttagttctactcactctaataacagagttcataaaagattactggaatttctatttctttcagttccacaggtttttttttttgtaaagggaaagaaaggttagacttatttacaacacaatgacaatctctgattcttcactttaagcaaataaagacgcctagtgaaataaatggattgtgttatttaaaattgaaagcttatgtgaaccaccactcagaaacatgcttaaaaaatacagaaagaaaatgaaaaccctgtgactacacaagattattctgatgccaaatgctgagtgtacaactaagtagagtaattgttaataatatgacaagtacctacttccaatgtacaaatgaaatacactcaaaactgcaaaggacagtggcactgtacgctgccctaaggtttaccatcacatagctttttgttttttcatgaatttgcaagatttgttttaattaaatgccatttacttttaactagccagtttatcctttttaaaaattttattgtttctctgcacaatttgaaccaaatttggaaaagttatgggtaaaagtgggtagaaaagactgttaagaattgggtcttattgaaatcaagtttccttctgtgttgtgcagcctgaataatgggcgaaatctgtcctaatatcttgctgcatctgtcctaactcactccttttacagggcctcagcagaggaattgcataacaatgtaacttgtatcctggttaaataggaaggtctctgaagcacatgtccaggaacattccgcttcatggcagaggagccaagattgtaccttttaagagaaagcactgtttccttaggcaacataggttctttgttggaacccaagagcgcctccagtggcaggcgtgcttttgcctctggataaatggaactgccagaggctcgctctatccatcctgtgtagagcacacactcagattctaggatctcaaagaaatgtatttcctggccctctataggcaacaaagtcaccataatttgaagctattatggaagaaagtccaaaatttaacttccattcgctttattcagcaagtttttataaggcagatctcatatggactatgctttgcataagcacggtgttagatgggaagaaaaaagtggtgggatccttcctcctcttcctttcttcccagctcctgctattcatggaatttcccttgatttcaagtggctactcaccaaaatcctcaactgaaaacagcttccaaggggtcatgtacttattcaattctcttctctcttttctccaaacacaacatcatctgaccaaggtttgcatgcataagcattgctaattaacgataagtctccacgatgtcctcctctcagtaagtttgacacacagacctcagcgaagctgtatgtactgcctaaaagtaggaaagatctccacgttgatttctgaattgtaaaaggcagggatatgttttggacttcttgtcccttactgtgaacagacctaagagtacttactttattttttagaaagaacccggagctgctgatgtctgagggagtcgtttcaacagagactagaatatcgagagagaaaattgatccagctctcttgtctggtgcttataaaacatgaaagtatcaccctcgccatggcagaccacagggaatgatcagtgtgaattgttaagtcctcttctcagtgatgcttgcaagcaatttccctggggaagcaacaagttcctgaccacagtgttgtacacaaataaataaacaaaatgctattactttttgttcttcacattgggaaaagttcagaaacatcttgtttcaattgatgggctggaattacagaaacattttaattttgtctttccttgctagttctgtgcctgagatgtattggtaaaatggaacatgagtcatatttctaattgggaaaagcctggtaatcatgggcaacccagatctgggtgacttacagagtatttttgtgttgagagagaaaagacactaaaagtagaagtttcttacttagcagcagcagagaggctataagattgaatctggtgtttcacatggcctgtatcatggtataatgagaaggaatgtgtcttgcacaaattagcctatagacctttctaatcaggaccaatatgtgacatatacaaaggcaagatcagctgtaaggaaggattcactcctttaccaccaagccatggagactgcttgagtcatcatggccttggtctcttgatttcccttatgttatttgagtagaaactcaggcaccaatgatgcccccagttaaccataaccataatggtagcatccaataccatttttaaaaaagtcagggttgtagacaaaagactgatgtagaccagtggagaagacaagagggagttatgcagcctactctgagagcaaagtctggtttggatcttctctgctacttttgtacatttcatgctagaggcagaacaagtatccagggaacactttggaactttcctaaatttacagaggggcctgtaacattcaattagggggaacacagaatgttctactctagcaaaatttataggtagtataagaaattccatcaagtgtcttgtggaaaactgaatgcataaaagtaaggatgtggataatgggatcattcaatatagatttcaaaccaaagtccgctgcttaataactctgaacttgggcagagtacttaaccttactgaacatcagattctttatttgtaaaatggggaccataatatcttctttgctcaattatttgggggattaatgagggaaggaatataaattatcacaagatctggtatatagtaagaactttgcaatgtttttttcctctctttattgatgaatgctttccagatttctatttggcctcttctctttgagtttatagaatactaattttctgtactttgtggcaaatctattcaatttaacagtttttaaaatttattataatgtgagacatggaatatgaagaataaataatgcataccatttttataaaagagactcataatctactgagaaagctagaaacatgctgggtcactatacattagacaaggttaagtggaataatttggttatttaaacatttgggagaaggggtgatctaattatataccaggcaccatacaaggtggcaaagacccaaagatgtataagatgcaattattgaactccagggcccttaattttttttctttttcttttttttttcttcttctggttttttttgtttgttttgttttgttttgttttgttttttatacaagagtcttgctcttgttacccaggctggaggtcagtggcgcaacctcagctcactgcaacctctgcttcccgggttcaagtgattctcctgcctcagcctcctgagtagctgggattacaggcacccgccaccatgcccagctaatttgtgtatttttagtagagacaaggttttaccatgttggccaggctggtcttgaactcctgatctcaggtgatccacctgccacggcctcccaaagtgcaaggattacaagtgtgagccaccacgcccagcctaggcccttaatttagtacaggaagagacatgtgaacaaacttcaacagaagatggagagaacaaatgatactgagtaaagaagtaactcgaaggacaagaaatcacttttgttggtagtgtcagggaaggtttcacagaggagaaaatatctaggctagatatacaaaaataactaggttagtaacttagataaaatggacaaattcactgaaaaatacaacctactaaaactgacacagatataacagaaaacctaaatagcactatatttattagggtaattcaattcattatctagacctttccacacagaaaattttagcttcaaatggtatcactggtgatttgaatcaaaatattcaagtacaaaatgacactagtcttataaaattcttcaaaaaatagaggaacagggaattcttgacaacttattttttttttatcaaatcaggcaaaaaagttacataacaattataaaccaatattctgcataagcatagaggcaaaaatccttaacaagattttaatcaaatctaacaacatacaaaaaatacatcctggccgggtgcagtggctcacgcctgtaatcccagcactttgggaggccagggtgggcagatcacaagctcaggagttcgagaccagcctggccaacatggtgaaaccccatctctactaaaaatacaaaaattagccgggcatggtggcgcatgcctgtagtcccagctactcgggaggctgaggcagtagaattgcttgaacccgggaagcagaggttgcagtgagctgagatcacaccactgcactccagcctgggcgacagatcaagactctgtctcaataaaaaataaaaaagaaaaaagaaatacagcctgaccaactagggtttattccaggaatgtaattttggtttgatattcaaaaatcaatcaacatacttgatattatcaataaaataaatgagaaaacgtatatcattatttcaatacatgaagaaaaactttgataaaattcaacatctattgatgatttataaataaaaaacccacctctcagcgtatcaggaacagagaggaattttctcaatctgataaagaacattctacaaaaaaatatattgttatcttcatacttaatggtgaactataatataattttcccctaagattgagaaccaagcaaagacacctgctcttaccacttctattcagcattgctctggctatcttagtcattgtaacgaagcaaaaaaaaaaaaaaaaaaaaaagagaaaagcataaatagaaaaagaagtaaaactgcctctatttgtaagcagcataattgttcatgtaaccagaacatcttaagggaatctacataacaatgactagagctactaactgcatttagtaaaataccaaaatacaggattaatacacacaagtcaattatatttttaaatactaacagcaaataaagggaaataaaatttaaaaatccacttattaaaaaacataaaacactcagaaataaattttcaaaaatattaatgtagtgagttgcattgggtcccccaaaagatatgtctacctggaacttagaatgtgatctttttttgggaataaaatgtttttgcacatgtaattaaggtaaaggtcttatcttgaataaggatgggccctaaatctaatgacactgttcgtataggagacagaaaaggagacactgaaacgcagaagaagaagatcatgtgagcatgtgaagcgagaggcaaagattgtagtgatgtgcctacaagctgaggaatgtcaaggattgctgacaacacccgaagttaggagagaggcacggaatagattctccctcagagcttccagaaagaatcagcccagcccacactttgatttcggacttttggcttcttaaactaaggaataaatttctgttgtttttaaacaacccatattgtagtaatttgttacaatagccctaaggaactaataaaatgtataagacctttgcagtgaaaatgtcaaactgttgctgggggaagttttaaaaggtctgaagaaatgcagagatataccaggctcatagactgaaagactccagtattattaagatgttaattcttctcacattgggccataaattcaaagcaatcccaatcaaaatttcagcatatatttttgctgttgttgaagaaatggacaagttaattctaaaatttgcatggaaacacagtttccagaattttcaaagtaattcaaaaagaatggaggatttatactactttattgcaagattcactatataggcacaataacaaagacagcgtggtgttaaagagagaatagacaagcagatcaatggaacagaaaagagtcgaaaatagacccacacttacgtggtcaatggatttttttttttggacaaaaatgccaaggaaactcaatgggggtggagggaagtcatttcaacaaatggtgttagaacaattaaatgactatatagaaaagaattaatcctgatccttacctgataccatacacaaaaattaactcaagttaataatgaacattgatgtaaaagctaaagttctaaatcctttagagaaaaacatagaagaaaatcttcacaactttgaggataggcaaagataacaaagataagataccaaaacaaagaactataagaaaaaaatggtaaattggacttgctgaaaatttaaaacttttgccctttgaaagtcactactaagaaaaaatacacaacaggaattgagagaaaatatttgtaatacatacaatatgacagacatattttgtatatataaaggtctcttaaaactcaataataagataaatagcatactaaaaaagaaaaagattcagacaaacacttcacagaagaagatctacaaatggtcaatacatacataaaaagatcctcaaaatcattagccatcagggaaatgaaaattaaagtcacaatgagaaatgactacacacctattccaatgactaagatagaatagactgacaactgaaagttgaagatactggaactcacatatgatcttatgggaacataaaatggtaaacaattttggacaactggcagttccttacaaaattaaatatacatgtaacacatgacccaataatctcctagagtttactaaagagaaatgaaaatatatgtacacagaaagacttgtacacaaatgttgatagcttatcaaaaaactggaaacaacccaatgtccaccaactggtgaatggataaacaaaccacgatatatccacactacaatgaaatattactcagcgataaaaaggaacaaactacttacacatgcaacaacatggatgagtctcaaaactggtattctgaatgaaagaaaccagacacaaaagagtacatactgtttcactccatttatacagaactatagaaaatgcatacaaatgtatggagacaaaaatcagatcagtgcttacctagggccagagctggagggagagatggactgcaaaggatctcaaggacacttttggagatgatgaagatggtctgtgttttgaatggtggtggtcttacggatgtaagccctgttaaaactcatcaactgtatactttaaataaatgcagttttttgcatatgaattatatcagacctcacatgagctttataatttctccatcttccactgtacactagcaaataactcttcatgacaatccagagagggatctggattgttttttaatttatgttagtaaacaaatttgtatattctagattagggatgagcaatctacatccttgagtaaaatccagcctgctctgtgttttattggaatacagtcatgctcatttgtttactcttctctatcgttgctttgttcactgtgatagccaagttgagtagttgcaacagagaacatatggcccgcaaagcctgaaagatttactctttggcccatcacagataaagtttggtggcccttattatagataataaaaagttagatgtgtacatggtaatatttgcatcaatgttatgtcagaaaaaggagaatctgcttacaagaatgagtaagaatggcacattggacttaaaaaaaatccatgtccatcaatatgaatcaacaacaaaaaaatgaaaagagaaagaatcaaatatatttagcctttgggtcctgaaaccaccttgtattaatcaacgctgttatagccaaaagctttagagagactaaggtggaactttttaaaaagagcaaggaaataccttatgaattcagccaaaaatgtcttgctgaatttccctttctcggtcatgaaataaatggaatcaactgtcatttctattcacgaggcaaaacctgtatctcagtttggtgaatagttacttatcaaactatgctcaatgcccaatttccttcaaatataataaaatcgcctcagttaagggtggggaggggacaatgtgtgatagtggaaagagatatgtctttggggaaaaaaagctcagcgctggatcctggcactaccattatgaataattgtgtgatgttgggcaagctgctcaaaaccatggcttcctcatctgtaaaatggaaataacatttcctcatttatggggttgttgggaagtttaaatgtggaatgaaacaaaaccccaaacacaaagtagccaatccataaatagcatgtctccccttccccatcaccattgcaatggcaatcttattatttaagatgaatttcatctcaacatcccaaggtgatattgactgttactgctctagaaagtatttttaaggtgtttatttgggggaagagactgattaatttctaaatttggctttaattcaatttttacataaatatatcatctttgtctcttcctagagaagcatgttgtgcttctacgtgttgtgaaatacctgctatgttttcctaataactctatatcccctatactgattatgcaagcatttgcaaaagtaatttaaaaaccatttgcttgggaggaaaaaaagctttctcaaaagtttttttctttttgtggtgttatcagaatcctttttaaaattgagtgctctcatctttcttgaaacaatttttctaagataagagaaagacttttcaaatactgcaagtcacttcataattttatggaagaaattgcgcaatgaacttagaaatattaggttcagtttcagcatgccccttaggtaggatcaatgatgagcaaatctttgtatctgtgttcttgtctcactgaggagcagaatttgtctttggacctctctgtggctatgaaaatccgaaagccctagagccacttgtgccagcaaacagcataacatctcccatccctaagagtgattttcagctttgcttgttaatatatccacatttatcacctgcctttagaatttggaaacctatctacttgcttagacttgttcctctcttgtaaattactcctctgtaggggcactttaatttgctgccaccaaacccctcttgcttaattaaactacaagtcttgttccttctaaacagccctggcctgttgttatccatatcccagcatgacattgagcccttggtccttcctgggttctagtttaaccatgtatgaaatgggaatgttgtgttcttgggcgctctgcacaaatgtactaaagacaataaaaggagatacaaacactattctaattttccagaagaacagattttcttattgctgacattactaaaggtaatctgaatggtggctttaatcaaccatttcttttttaaattaattttattttaagttcagggatacatgtgcaggacatgcaggtttgttagaggtaaacatgggttgctgcacatatcaacccatcacctagatattaagccccacatgtattagctatttaccctgatgctcaccctccccctgcccccccaccgccctgacaggccccattgtgtgttgctcccctccctgtgtccatgtgttcttactgttcggctcccacttataaataacatgcagtgtttggttttccgttcctgtgttagtttgctgagaataatggcttcaagctccagccatgtccttgcagaggacataatcttgttcctttttatggctacatagtatttcatgtgtatatgtaccacactttctttatccagtctatcattgatgggcatttgggttgattccatgtctttgctattgtgaatagtgctgcagtgaacatatgcgtgcatgtatctataatagaatgatttatatttctttgggtgtatgaccagtaatgagattgctgggtcaaatgatatttctggttctaggtctttgagaaatcactacactgtcttccacaatggttgaactaatttacattcccaccaacagtgtaaaagcattcctatttctccacagccttattagcatctgttgtttcttgactttttaataatcgccattctgactggcatgagatggtatctcattgtggttttgatttccatttatctaatgatcagtgatgttgagatttttttcacgtgtttcttggccacataaatgtcttcttttgagaagcatctgtgctcatcctttgcccactttttaatggggttgtaatcaaaccatttctataatatttcaaaatagtcaatctagaagttatcataatttttaaatcttactatattttctttaaaatagcaagtggcatggagaaaggagagtatctatatgaacatacccagaagaatctaaaaatagaaaagaaagaaaaaaaagctacatattgctggacacatgaaaagcccacctgactactgataaggactcacaagtaaccatcaagaagcttaacacaaaaccggaagcagtgagccaatcatggcatgtcttaatctttcagtaataaaagttgcgattttcaaagtgactctttctcttttctgtctctatccagagtggtgtgcctagcctcctctgaagtgcttggctctcctgagcaccatgctgggacttactggggatagcacttttcagaagcactgaatacaacagtattcccagttagtgaaatgaaaacaatttgtctctggtttaagaaagtggcctgctgtgaaattaacaaaatattgtatgtgtttgtgtatattttgaataaggcactcaagattggtgtagaatgtctttattttcataacgtcatgttaagctaattttgtttttgagacagggtctcactctgttgcccaggctgaagtacagtggcatgaacacagatcactgtagcctcgacctcttaggcttaagtgatcctcttgtctcagccccccaggtagctgagactttaggcatgtgccaccatgcctggctaattctttatatttttttgtagaaatggaagtctcactatgttttccagaatggtctcaaactcctgggctcaagcgatcctcccacctcagactcccaaagcactgggattataagcatgagccaccatgcccagccctaaattattatcttatcagattgattatagaaaagtctccacttttcagatatgagactttgctttgtatccctaaattaatttgtgacctaatctacaatagtgtaaatagagcaacatggcaacatgccctcccttacccagaggtcagtgtttcttcaacctcaacttcccagagtccagcctagaatgcagaagtgagcaaatgaaacactttaaacactcgaagtagcatctgagagtttccaccatacagtgacgactttctctttatagccccactcagaattggaaactgactcatttcatttacaatttatgacaatcttggttaactttttcccctggcccaaagatgttttggagtaacaaactacaagtgaattgggagagcagctgggagcaggcacaagaagagcagaaaaaagcaactgccaacagctcaatacaaaatacagactgaaaggcaaaaagcagacaaagacttttgagagcgtagaattcaacaatggcagttcataacagtgacctgtagccacccagtgcattaggcgcagaaaatttgtatagagactgaaaaggcagaagttgttgtgatgcctgggtaggtaagctcttgtttttataaaaatttacttatatggggatttcattccttaataaaataggatagctgaggcactgctaatgtaattgaagaggggctcatttcagcacttttatttggtcatttttacattattttctgttgagttcttgcataaagggtctatgtgcccagagagggcaggctcatgtgggttttgcccatgcgtctatactttgcataaacacaatgaggtgcttaatgaatgtctggtgatgatgatgatcaagagcttaataacagggtcttctctaaaggctgattaatggggcttcaagttaatatcttttcattctctccttgcactcatatttttggtgtgtgtatgggagtgtggggtagaaggactataaactgagtatccattggaaaaaatgtagaaaggctatcctatttaaagagtagatagcttttacaaaataattgctggtggtgaaataagatgtccaaaattgtattcctatgacacattccattatttggacatatcttatttagccaaactccatttccaagattgtataatcatacttgctatttacaacatctgaaatggatctgcaaagttaagtgatctttggttcaatcaatgaattatcttgcaatagacctatgtgctagaaaaccaagtggtgctgacagctactgtgatcctacagttctgccatgccacacacaggccatttaattttctacttgaatatagcaggtggtaactcttcagtcacccgctctcatctaccagttagtttaactctttttttttttttttttttttgaaacggagtctcgctctgtcgcccaggctggagtgcagtggcgcgatctcggctcactgccagctccgcctcccgggttcacgcctttctcctgcctcagcctcccgagtacctgggactacaggcgcccgccgccatgcttggctaattttttgtaattttttttttagtagagatggggtttcaccgtgttagccaggatggtcttgatctcctgacctcgtgatccacccgcctgggcctcccaaagtgctgggattacaggcgtgagccactgcgcctggcccagttagtttaactcttattaccattaagtcaagcataaaaacaataaaactaaccctgccctaaacaggatccactcaccagtttccttgttgccatccactgtgccatcatttttccagatttaatgtgcgggaagtcatcttagatctgcccctcccgcagcctcctcaaatccatttttagtgacaacgttctatagctcttctgagtcacatgtgtcttttatctctccacttttcactattgtctttgtctaagctcttaggcttcttacctcttggataacttcagcagcttcctgactagcttccccctctctggttacttccttctccagtccacctagaatttcattaacaggataattttctttaaaatctgctttcaatttatcatgccctaagcccaaaatcttcactggaaacttatatcatttcatatttatgagtccataaatatgagaaaaactccgtaagcaggaaaacattatagacttgccatcgtcacagtaacgactcttcctggatgtgacataatgtgacccatcttccccgaagtataacctgatttgaagctgctgaccaacatgccacattgggccctggttaggtcaggcttatcactgtcagcgagcacatcctattcttcctgcaccactcttccctccaggggctgaataaaagtacaggcaggagttttttatattgtgaaatgaccagacctacatggttttcccaagagctctgttcttgaccccctgtcttgtttattttattaaagccttggatgaaaatagattacattcttatcaaatttgcagatattgaaaatgggagggaaacaaaagctatgccagatgacaagatcaaagctcaaagagaactccaacaagaggtcaaaatgaagagcaccaaatgtgacataaataaatacattttgaatgttagattcaaagctccaactgaactgggtgggggaagactccgtacaattattattctaaaaaaattctcaggagagaaggtcaggataagggtgagagggcatggcttatttacaaggaaaagatgaacaaagtcaagtgttttgcttccaaaatggccaatgcacacttaggcttagttaatagacttacattggctaaaagaagggaggggctagctacatggtgttcttcactgatgggacagctcaagaatattttcaattctggtttctgtgtcagttgacaaatacatggagaattatgaaggatctagaaatcatacatatagtatagacatagatttataaagaaatacatatatagatttataaagaaatacatataatgtatagatttataaagaaatacatataatgtatagatttattcatgtttaacctgaaagaagtgacatcaacaaaggatgcaatgtcagtgttttgaaggactatctgagtagatttcctccctgcagctaaggaggtaggaactaaacccatgggtgaaagtttggaggaggtaaactttggctcaataaaaaatattattttctatccatgagagacataaagcagtggaataagatgtcttgagaaattaacttcttatgactagaagctttcaagtatagactgagtgacatcatcacagaaatttttttggcattcttggagtgcagaaagttagactagataacctgaagactatcttcctttcatctctaaggtgtaatattagtccccacacctgtaaagccctctcctctcccatctctacacaacacttatcatatttgctttccactgacagacatctctggctttctcaccagactgggaactctttgaaggtagagattctattttttatctatatatccctggcttctagcatgattccttaaggagctgaggtactcaatatatttcactgaattaactgaattatgaagttctactaaaaaaattctatcttcccttcaatgtccagcacaaatttccactttccacagaaagccttccctgatcactcctacaggatatattctgtgtcagacaatttgccacatgtaattttctgtttctttctggtatgatgttgtttactatgtgccatttctattatcccaactagatgatcagttcccaatgaacaaaagaatacccattcatgatctcatggaggtagagagtacaatgacggttaacagaggctgagaaggacagtggggagaaggaataaagaggggttcattaattagtacaaaatacaattagatagaagaaataagatctagtactcaatagcataataggttgactatagttaacaataatttattatatacttcaaagtaactagaagagtagacttggaatgttcccaacacaaagaaatgatatatatttgaggcgatggatatcctattacccagatctgatcagtgatacacattgcatgcttgcaccaaaatattatatgcaccccacaaatatgtacaaccattatgtatccataagcataaaaaataaaataaaataaataccattttaacattatgccttattgctgtgctcagcacagaactggctactgataatgtgcttactgattgattgaaaggtaatattgtggaaggttttggtgttaaataatcatattccacttattaattacaaagagaaaaatggtaactttatagtggagaaaagtgagagatagaaccttaaccaagtaatcaaaatttacatcacctaggagacaacatcttgccataatcgaccctgagaagatgcactgaaaagggcacatcattgcttgggtggtgtttctgccaaaaatgaataatctccatctaatcacaaggaaacatcagactaaacccaaactgagggacagtctgcagatatctgaccagtagtaagccagagaaaagctgagacactgtcacagattgagactgggcaaatgtgacactacatgcaaagtgggatcttggattggatcctggacctgaaaaagggcatctatgggaaaggttgagaaattctaatgaggtctgtagattagtcagtagtagtataaccatgttaacttcctggcttggatactatggttatgaagatgttaactttaggggaagctagatgaaggctctatgagaacactgcattatttttgcaccttgtctataagtgtaaaattacttcagaataaaacgttaaataagatttatgagtttggttttcaacttgattgaggatccaaacaacgaaggcagctaccgtgaaccaaaatgaataaggtgcactccattcttgttattcgcgatagctgtgttctacatggttgctgcaaatagcgaattaacaaatactaaagcattgcccctaggggaaatacagggttcgtttcctaaaagcctctggccacatttttgtcaactgatcaatacacaacattgttttatgtgtgtttctgtttaaagacatcttatttaatatgtattgttgattcattaacaatgaactcatagctaaaagccctgtaactcatgccggaatgaagtttattagccacatattttcctcatcaggcacatcacaaccttcttatgcttaggaactctagccagcacttcaacattacacttgggagtcattttaaacagcaaaatcatcaacagaaagcatacaaatgcaaataacagtggcatcaggtgacacaaatttttcaccactctgcacatgtccataaatgattacagaagttctgcaagtattaatttggggatttcaaatacattttagtgagtgggctaactcacaatatggaatctatggataatgaggattgactgtacctataaacacatgcaatgattgtgaacttcttggctgtcaccttgagtcaataagaaaataagtataatgatatttgcatttgaaatgataaaaggaattcttgaaagattagcaacttagtaagtaacttagttctatttcactttatggtcttttcccccatcctgactacactgaggatttctctagtatcctggcttcatcaatgctagtgatatttgtctcctttccattttagtcatcggtatacacagccacaacctgaacttcagtgtcagtatccccaactgcttcaccttcaggaaatcccttcctaattaccacatatcccactatgcacttctattgaatctattcaactcctacttatggcctaaaaacaaaaactcctacttattcccccagccaatcactctcttctagctgtgctttatttagtcagcaatacttgggaagttactttgatgatgctttcactagcaccccacaatctactatcttttgatcttttacaagtttttatcttgcaaactatgatcgcggtaatcagtttggtttttttgtgtccattgctggtctgccaactatttctgcaaaaattcacaaacacatattgtttaaatgcaaaataaattaatttacctaatcaactttcaacaagtcttcattgttcttattcttattgatctacttgaaatccaattgcacagacaggatctgccaaatattccctcctttctacacacactgccaacactctatttcagactgatacatagatcacctgagcctataagttcctaactagtctctccacatcctgtcctgtccactttataagctaattaatcatctaaagtagacagttaatcaacctacatgctccccatagctacctggcaaaagttcaaacacctttacatggcattcaaattcttctatgaactgacttcagattacttgtaaagccttttcttctactaaacctatttgcaaactatgtctcagcccaaatagactctttgcattctcaaggacgtcttatttctctctaatcaagtcccttgtctgcacttttctctttatgtggaatattttgcccccctcatctctgtccatcaaaattttacctgttcttcaagccccagttcaaagtacatttctccatgaagcctactctgattttacaactggaaatagtctcttccttggattcgccacagcactttggaactgcaattaacgcatttgtatttgtaattattttattcttcacactacatttcaagatcgttgagagcagaaaataccatttcaatcttgcatttaccatagcacctagcataaatgctcagtaaagtactatttaatacatgaatgaatgaataaatgtgcctctcatatgcttaatatgtatgtaatacataatgtatagatatatgcacatatacatgtaacctctgtataacagttaaaattgaacaaggtccaacacattgtcaatggaccatattattggtagattaaaactgtaagtagacataggaaaaaagagaaaacaagagtggtaaattaagaattatttgacaggccaaaataaaatcgactgagaaaacttatgtgtgattaactattataacattaactttttaggcagggttgtattgaaatcttcccagatatagaaatttatgtactttattcctaggaacccaaaataaaacataagaataaacatatccaatgaatcaaattgaatagacattgctagacacagttaatactataattgcacatcacttaacttgaaggacttttcaattatgattaaatgaaaaaaaagtaactcattctttattctctatttcatttgcacagtgaatactaacaaaataaattgccatcattaccatcactatcaacatcatcataaaatgtatttcttagttaaaaaaaaaacttcaaaaactgtactaagagatgtagctctgtaggaaggtacaactgtagaagtttagtaacatcaaagcaaagcaatttatcaatttcatgactatgatggttttatttacatctaatgaacaatatagaaaagggtacatcaaggcccagccatttaacaagggacatttctccccagtaagttttgttttgttgcaggaaaattgaatgtgattactctaaaatttaaaaaaaaaattaggtaatgaaaataagtcagttctgtactgataagcattaaaatatttcttcctgaggtattttctatatacttatggtttaatgaaccctttaatttctggtgattcccaacatgctaaggtaacttttcaaaagctaagcctcaactgcagcctagtgtcattggctgttgaacgtgtttcagattggatcatgtgcactgaagcaacagcagaactgaaaggtgaaaattctgtagatgctaaaagaaacctctatggaacttacacgaagggtataaaggagacctgagattaacatttcctaaatcatagacttgtgaaaaattgcttgccaaaagaaaactttgtataagtgaacagacacttattgagcacctatttgagtcaacctgggaataaaaagatggttaacatggtgtctatccaatcaaacaattcaaaaaactatacaaaatagacatatataacattgagtatcatatactatgatatgttagttgtttaaataaagtattctgtgaaaacaaaagaaagagctgtctaagggaggggagaaggaaacagagaaaaaggctagtctttgacctaggcttcagaggacacaaacagcccaaacaacatatcctcaaccttgagtgtagccttcaatagaaatccaagttttaggataattccaaagcatgatatatgaaagtgattgagattaaagatatatcataaatatctgaagtgatgagtatgctaattagcctgatttgaccattccacatgtataggtgtcaaaacattccattgtattccaaaagtatatacaactatttgtcaatttaaaataaaataaaacttagaaaagataaatcccaggtagaatgtgtgatgagacactgaatgaagttaacaaaatgaattatgtttattgggatggtattctcgcttaataaaccttaagactctgcaagataaggaatatattattgagtgtggtggctcacgtctgtaatctaagcactttgggaggcaaaggtgagaggactgcttgagcctaagaattcaagatcagcctgggcaacaaaatgagactctatctctccaaaaaaaaaaaaagaagaaaattagcggggagtggtggtgcacacctgtagtcccagctacctgggaggctgaggtgggaggatccactgagcctgagagttggaggctgcagtgagccctgaccacaccactgcactccagcctgggaaacagaatgaaatgtggtctcaaaaaataaaaataaaaaaggaatatatactacagtccatattgaatttattgtcagaagtgcccctgagagatgtcatcatctgatacagaagaagttgagagtgacttactggggcttttagcatttacaggtgactcttcaacatgggtttgaacttcatgagtccacttataagcagatttccttctgtctctgccacccctgagacagcaagaccaacccctcctcttcctctccctcctcagcctactcaatgtgaagatgacaagaacgaagacttttatgatgacccacttccacttaatgaatagtaaatatattgtctcttcttcatgattttttaaaaacattttctcatctgtagcttaccttattgtgagaatctagtatataatacagataacatacaaaatatatgttaatcaactgtttatgttattggtaaagcttccagtcaacagtgggctattagtagttatgttatacttggattttccactgtgtgcgggttggtgccccgaactcctgagttgttcaagggttggctgtactatacagagagagtagaaaaatgatcaccttttaagaaatgctttagcttaaggataagcaacataatcaatcgtgccatgagctatgggctgccagaaagtaatgcgttatatttagaaggctttctcctcagtactcaaatagaagagatttccaaattataaatcaggattctggaagcagagagcgcgatggctgggccaagcctcagatagaattccttgctaccatcattttcatcagaacagaccagcatccagacacctcctctgaaaataaagagtggcctgaagtttatcctatattaccttagaaacacaatctacagacaatatggattatctataccttcttaataggtataatttagctacattcttttaaccactgtatgcaagtgttgggcaagtaatcagctgagaagccctaagccctctggaagcaagactttttgactgtccctatatttacttgtaagaggcccaaagccaggtatgaaggagattcaattacagaaaaatttaaatcaatggccacaataaaaacagctttgatttttggtcccagataggccatttgaagtattacctgatggggaaaacctaaaatgcttgtacaacatagagggtaaaaaagagttcttaaaaaacttgtctttgagggtgggagtgggggtgaaagataatagactacacattgggtacagtgtacactgctcaggtgacaggtgcaccaggatctcagaaatcaccactaaagaacttatccttgtaaccaaaaaccacctgttcccccaaaactatcgaaattttttaaaagagttgtctttgctaacagtcctggggaagcaattttttattaaaatattgacattcctcccaatgcttcatttgtctagataaatgtagcccatggcacaaaaatacgttcttaggctgggcacagtggctcatgcctgtaatcccagcactttgggaggccaaggcagacggatcacttgaggtcaagagttcgagaccagcctggccaaaatggtggaactccatttctactaaaaatataaaaaattaactaggcgtggtggtgggcgcctgtagtcccagctactcaggaagctgaggcaacagaattgcttgaacctgggggcggaggttgcagtgagccaagatcgtgccactgcactgggcaaaagaacaagagtctgtctcaaaacaaacaaacaacaccaaaagtacattcttaataaagtagaaatgcacggtgattatgctttacttatcatgctggcatttttctagcaatttttatttttctatcattcccaacatttttaattttccatgtatctgggatagaatgtggaattaaaataaaaattaaaacaaatctctgtctaagagctttcttgaagtatgacaaaggtttagggacaagccgtttgtaattcgctgatggcaggaaaactaattcactactggagaattctgacatctaaaatctacatactgatatgctggaggggaatgagagagaatgtctatgattttaatttacttaacctatttagaaaaaaaaaagtcatttgagtcatcctggctcactttctttagcattagtcagattgcatttccttaagcctgcgagtgtgtttctatgtaaataaactatgtagttcacttggggataaaagtcacagtatttagagattataaagacctattagatcatccggtctggcccacaagagataatccctagatagggaacataactgttgatctttgccaagaagccaagaagaaacagttggtaaaaatattttccatacttttttttttttcattttaacttatctaatagtgcttcagtcacttcccaagtggactagtaaaatgatcatgaaacagttcagcttatcagggagatgcaaagtttaacttatctgaattgacaatggtccaccctcctccatttgttaaagaaatgctcttgtttgcaaaatgtgaacagtgaagaatctgctctttgaactagccaggcagtttcctttcagttaagaaagtcaaaaggcaagttgtacctcactggttttcttaacctactttcactaatttcagagaaattagatattaaaacaggaatctgtacagagtagaaaatgaatgatacatttacaatttactgctttacaaaccaaagtattttccatctttattttctatattacataaaatatgaaatattattgaaacttgaagtatacagaagtttggcattagggtaaaagtcaaagtgactcggcaatatgaaccttaagaaataagaatttgcttaagaatttccagagtcagtatgatagttgtatcatgagagattatattccattagaaatgctgttaaaaaaacataatgtggcccttgacttcttaaagtctacatcctaaaggccgggtacggtggctcacgcctgtaatcccagcactgtgggaggccaaggcaagcagatcacctgaggtcaggagttcgagaccagctgggccaacacggcaaaaacccatctctactaaaaatacaaaaattagctgggcgtggtggcaggtgcctgtaatcccagctacttgggagactgaggcgggagaattgcttgaacccgggaggtggaggttgcagtgagctgagattgcaccattgcactccagcctgggctacaagaggaacactccgtcgcaaaataaataaataaatagtaaagacacctattctggtcactgtgtcatttattccctagttcttaaatcctgctttgatcaccctacgtgttttccctactgagattatattcagaaaattgtcaatattcctgaagaggtgaaagtcacacacacgtacagaaataggaaaaactaacgaatagtaggggatgagctggtaacgttaaattaaaagttagaaaaactggatctaaacatttaaagcagaattatttcttatcagctaaacacaaatcaacctaacccaggaaggaaattttctatttttattcagttagaatttccagagtcggtatgatagttgtatcatgagagattatattccattagaaatgctgttaaaaaaaatagtgtggcccttgacttcttaaagtctacatcctaagtcaagagcttatatttatttaagcctataacaaatttgaggatttcagaactcagtgagactctccatgtgcactgagcatgcactgtgagctaagccctttgccaggttttgcaagaaatcataaaggcagtattagatatggtctctgcccttccagagcttacagtatgagagggaagataaatatctactcctccgaccctcatctcccacacatgatgaaaagtgagtgactaacttctgctatctcatttacattgacctcagatggtgaatcagagtctagacaagaaaatcacacatgtacatggggaaactgaggaaagtttaatgaaaggataatttgtaaagattggacagagttaagagggaccaagaagagatggtgaagtgtcccaggactaacaatagcaggaagtccttacacccaaaggcctgaaagagcaagaagagggagtagttatcagaggccagagagagagctgaaactgcaagagatggcctctctcaggaaggaataaagctaggtcctctctgtagcctacaggaagtgagtcaggggcatttagtaccctaacctctgtcttcagtaccctaacctctctcttcactttctctctaatctctccctgttgacttacttgggccaaacacactcagaagccggtgggcaaaagagactgttgaggcaatgcatgaaggtgcgcctctgagagcgtagagctagatagaaaacggtagagaaaagatctggcaaggcaggcaatggccaacagagctggatgaatttagagccacccaagcttacaggataaatatatgctatatccagaagtaaacatttggatagatcggttaagagtaatgctttatttgcaacagaacattttggcactttcccattagataagatcagtcaatgttaacataagcttccaacttaagccacagaacataaatggtgaactctagtttaaccaatattctgccaagtgaggtctataatttgtacttttatgtgtcaactaattatacaagataaatttggttttataacactgaccttgaagcatacaggattcagaataacttataaatcttaggagatgttaaattgtatttaaaacagttttttgttgttgttgttttgtttttgtttttgagatggagttttgctcttgtcacccaggctggagtgcaatggcatgatctcggctcactgcaacctccgcctcccaggttcaagtgattctcctgcctcagcctccgaagtttcagtagctgggattacaggtgcccgccaccacgcctggctaatttttgtatttttagtagagacggggtttcaccatgttggccaggctggtctcaaactcctgacctcaggtgatccacccacctcagcctcccaaagtgctggggttacaggcgtgagccaccgtgcccagccaaaagttttagttttaagcagaatatattctttattttaaaaactggtcatttgtatatctcatacatggcaattctattaaaaactatattgattaaccagaaaactctgcttcttggtcatggcaaataataaaaagtttactttccataaattcattttgcacctttctcttcagtctttgggggatatactatcctttaattatgcttcattcaatatgtgttttgcagattggttccagtatatcagtagcacttcgttactcaataataaaaagctacaaatagattaaaagactctcaagcccctcgaggatttagaacacacaccacgaatgttccatttatgctttgaagttgcttattggcagctgagcaggagcagtatgttgctctaacactgcaggctcaccatggagcatcatgcatcccaatttggaattcaagttatgacttgaatcctatacattttattcaaatataaaaatggcaaccacagaacacttgaggccttattcatcaaacagaattcatcactgagtcattctggaattgctgtctttctttcctggacttgatgaactttgatacatgaaatttggctgcccttggtacaattcaatcaacaattagagcactagaattgcagtgatcagcctggtttggaaacatgtctaaaagtttttgattcaatgtaaaagctgaatgtgtgtcccactcctctttccccactcccctcatcaaagccctcacagtcatatgacagcaggacttagcagtaataaataatgtatatccctcaaatgtttcaaagactatatataatataaaaagtgataattatttgtgggatccgaactgtgcagataaccctgaaaatggattcctgacccagaatttttttttttaatcacagcgagaaaagtctttagcacttgaagaaatgggacatcttaattttagcttctgatcacagtttataaactataaaacaaatttctttttaaagtcttataggaacaagaagtgatcttgactaagattcccctgagatagcctcgcaagtgaacagataataagatcacaaaaatgtgtttgcctgtgatctttagatggccacacacagcacacagtctactttcaggtaattttcaagtaaaaatctcagtgtaatcataatgtattgatttgttttgccttggttccttttcacaaatatattgatccacattccttctacctgaagcactcagaagagaaaggcaagatgcacaaagtaggataagtcagaaagaggtggctatgttatcaaacatttatttggatcacattttaggaaataccccataaagtctctactgtgcttattcaaagagtcctctttccctgaatttgtatcttgagaagttaagtctcattttcccctgccagaactggaacgatttattaaagcaacagaaagaaaatgaaaaagacagaatccatcttctagacaaggctcaagccatattaaacatgacgctacgtgaatttctcccctcctccaccctccttaatgcaccatatagagaggctctcatgctgtaaagatgtcatatatactttctcttcactcaaagcttcctgaataaagagagatctatttgtctccatggtgttttcgccattaacagtatcagagctgcaggaacacaatgggagatgtgttttccgttaacctcttgactcagagatgtcctgatgctaaacgttattgcattttgcattagcacagaacagtgggagttctgtgactgatgtaaaagggttgagaagggccacagaagctctcatgtgctccatactgcagttggcggtggagcacgaagcacataatttttgttcagaaagagcacaaacgggaaccagggaaggaggtggtgaatctgacacagtccctcctgttcaccactgagataatctacactgtaaaatgatattcagtgtctgatcatagacattaacttggcagaaactaatttacttttctttattaccttagccatcagcaaaccacggaacgaacaaggggattaatatttactttcttctcaggctactttttccattgccttaatatggccttcagcgttagtagtttgatgtggcaaccattactgaaaatgttccttactattctgctcatgtccctttgacagtgcagagatagaattggggaaatacccttccacgctataagacaaggaggatatgtagtctaagaagtaagagtcgtctgggcgcggtggctcatgcctgtaatcccagcattttgggaggccgaggcgggcggatcaggaggtcaggagattgagaccatcctggctaacacggtgaaaccccgtctctactaaaaataccaaaaattagccgggcatggtggcgggcacctgtagtcccagctactcgggagactgaggcaggagaatggcgcgaacccgggaggcgaagcttgcagtgagctgagatcgcgtcgctacactccagccttggacgacagagtgagactccgtctcagaaaaaaagaaaaagaaaaagaaaaaaagaagtaagagtctactcatgaaatcaaagattactgagtgacaatcccagaattgcagaatattcattatgggtaccacagaaactattgcgtttcattccacgagtttacatatttgaagagtggaggtcataatgtttaaatgatttgactatggcagaaccaggttgggtaccagcactcatgtactcatgtccccaggtgaattctctttacatgcacgagtcaagcatgcttctgttgaatgaatgaccattgtactaggaagatctataggaccttgctcaatgtcacaatatccctatttctaaaatgtaacttttttgtgtgctgcatcaaagggttctgtattagtgaagggaactaaaatatattaaaaatataggctgtgtgacctacaattaaagggggaaacttgatgtatttatgtaaagatgggaagccatcctcagatttcttaccctcagcttaagtacttggacttctggagtaaagaagcatttgattatgtaaaactttgctaccctagagtgtgttccatgtattaacagcagcatctgccctgaaggattggttagaaagaatagcagtggcctacgttgttattctatttgtagttggaacttatattaaatatttaggaaatatatattgcttgaattaagaaaaacttggtttactcctttttcctaagatcttcataaagctcagagaagacaatatgccaaagtcaacttagagagaaggctactgtttgtcctcacaagactgtctttagaagtaaatacatttctggtataagaagggggctgcttgcactgttacatgctagctttagtatctctattaataagccaattaggaaagaatcttatgcctgctaattaaggagcacagatgatccatcttcaataaagtttataaactcactattctaaatgaccagtccccttaaattgggtcagcaaaacattctttgctggatgaagaaggtcaagatgccagcagtgtttctacgttttgaagctcatcagtgaactaggaaaatagctggattaacagattctgaaaaattaaaataacatatgtaccacccatagagatataatttcttgataaatatgtaaaagtgtatcccactacaagtttcttttccttccttttttttttttttttttgagacagagtcttgctctgtcacccagactggagtgcagtggcacgatctcagctcgctgcaacctccgcctcctgggttcaagcgattctcctgcctcagcctcccgagtagctgggactacaggtgcatgccaccatgtctggctaacttttgtattttttagtagagatgggatttcaccatgatggccaggctggtcttgaactcctgacctcaagtggtccaccctgtcttggcctcctcttttccttcttaaaccctgagattaattcctagaagatactatggccatttgtctaaatgatgtatttgggatttatggggttaaaaatgactgtccattacataaaattcagtgaagagtttccctgaggaaatagaacacatactcaccaaagatgaagacaagggatacattattttggaaaatactttacccatccactactgctgaaattcacactaagatggtatctaaagtggcttccaacattatctattttccttgcattctcaaactctttgtcccaccatgagctattggctaaaaatcaaaacaatgtgagctcctagacactacagccattctaaaagcacataaggcattatttaaactctagtagataaaacctcattactaaagtcagtagaaattcaatcctagtaaggttactttgtcttcagaagcagggtatcccaaacactagcttgctcttgggaatcatggatgtgtaaacccactcaggtttatcccattgaaaaggagaggatcttattgttttgtagaaaaagataacatgatttttttttaaaaaaagaagctttataaatgtataaacagtataagtaggtcctcatctgtgtcaagtggctacagatgtttaatatacaaactcatccaacacagatacaggtaacaagtatgcttaatgttaaactcataataaatgtcacaaagtaatgacagcatcttctaaagcaaggcatagtcccttctaaagaatgaaagaatgagctaagaaataaagacggcacagcagcctttgagtcttgctcctagttctgctgcagagtaccagggtggtttcaaagtaacatcgaaccttcagccgtgcttctttatgacatggggctagttattcttgacctcttagtaacatgacaatcactggtggtaattcaccataaaaatatttgagcatagaatcaaaatcctgacacagggaatttcatcttttctttgaggtagctgagagagagagagagagagaaactataactacagactgcataaccatttcctttgacatattttgtacattaaactaccagaaaataataaaatggactaaatacctcattatgtaccttctgactacccatctgtattttctactgaaaagtatccagacatggaacaactaactccttcctaattgacagatctggatttgagtgctggtttggctgctcatatgctctttgtagattgtgggatttccatctaagacaggtaaaatgtctgttgttcatgacattggttatcactatgaaatgaccaagtttatgctttgagataatcaatctctacattattactattccagtcttttggtatttttccatagaagttttcatagaggttggctagagcatatctcaataagagggatataaaattgcattcaaagaccagcttagcctaaaacccaaaatgtgaattccaaaacatggctctttatcttggaaacttccttgagtggagagtacaaaattcttttaatttgatgatatctaagaaagtgcaatacagttgcaaaaaaacagccccaatttgtaatgccttcctgagttcatgtcctttgccatgaaactttgtagtagtggccactctgccttcaggattggccatgtggcttcctttgaccaatgagatattagcaaatacaaagcaggcagaagcttgtaagatccttaagtcacttggcttgtccttgttcttattcctctgcctttaccataagaatgtgctagaactaatctgttgtcagatgtgacacatagcacagaaattagctgcccccatcaatctagtgaccccatcttagagctgacagccagaagaaatgagcccaggcaagaccagaaaacctgtgtaaatcacagatacacagactcatgagctaaatatgcatttattgtatgccactgaggctttgtagtgtttattatgcagcatttttttgtgacaatgctgcattttttgtgacaatttggtgtttattatgcagcatttttgtgacaatggacacctgatatactgaatccctcaaagcctcacatttttcttaaaacaaaatctaacccgaggaaacagaatatgaaaatacagcatgggtacaaggattaaacaaaacttgaattctaaaataccataaaataatcgtacccaatcttacctttcatagggagaaaaggcctggaggaatcatgatcgttctcaccatgttgtttagtgcaagacccaaggaaagctaggaggctgtacagttatctcccttgatgtaattctaaactatacaacctactacctcaacctgggagcatgcagtcacaatggctggaaaactaccatttcttaagcagggaaattacaagttagtcttataatgattcatcgtgctgtcacctatttgggccattcataagagacaacatatcaaagagtctgatgatagaagagataacacaaaaaccttggcttgagattaccatgaaaacatgaagggagcaaatacttgggactggccttcttgaactatttgtgcatggaaattatagtaatgttacataatggtgattctgaacaatttaatgccttctgatatctgttgacgaaatagaatagtagaacaatatttaaacttgggcaattaaaaaaagattagaaaaataaatgttcctctggtaaaactgaaaaactggaatcactaaaagatggatatataagaagaaatggcttaaaccaaaacacagtgaaaagacatagaaaacatgattctgagcaaaatacagattaagaaataccgcaaaagctatattgaacatccacccaacaatatttatcatgtattttacataattctcatatttagaaagtgctcctttttccagagttgactgtttcagcatttctcataaatctgtccccaacagtctattcaacaacctacaaaatgtgcctatttccctgtttgcacttgtaattttttttttttccaagacagagtcttgctctgtcactcaggctagagtgcagtgctgcgatcttggctcactgcaacttctgcctccctggttcaagtgattcttctgcctcagcctcctgagtagctggaattacaggagtgtgtcaccatgcccggctaatttttgtatttttagtagacacggggtttcaccatgtcggccaggctggtctcaaactcctgaccttgtgatacacccacctcataattttaaactgaatctttcttgtatcttcagtcccaggcaggtgctggagcaggagataggctcctacaagcttagcaacttctcatttctatgtaaactcaagtttggtcaggtctatattttcccacaaggactgctctgtggtctatcagaagccacctctcctcattgcttagctggactctggttttgcccagtaaaggctgtgctacaaaggagctaggtcagcctaggcaaatagagatggaggcacatctgagcacactgagaatcttcctgatacttctactgcactgatcgtgttcaaaagacagattcaaatgccatagcattgatgtttcttcatgttattccactagcctggagaaaagtgattttttttccaatgtttccaaccctatttccttatgctttgatgaggtgaaactgctttttttggggggcggagcgggggggctgcctctgttagatcaaggctacctagtttgggagaaagactgggaggttagttttatcaaaaaaaaaaaaaaactctcattcatccttcaagcctcatttgaaagagttcttcctctgattatctcacaatttcatatatgcatttatgctttaattctcacatcattgcattatagtttatctgtttgtctcattcgctggaccccaagctatgtgaaaatgggaccccataattcacctttgccaatctggtattatctgcaatggcgagtagatggcacatatagaaatttaaaaaaaaaaaaaaactttgtcaaatgaaaagaagaatatatgcataaatggataaatgggagtataaatgaacttacagttaagggatgatcatttttatttttatgtccaatcctttgttcttccacttatgttagaatttcactcatagtaagatggatttgctattaagattccagagagggcaaaaaatcagagtggctgaattcaacctggccggtttaaccttaaatcccagatctcctatggaaactcaagatgtatttccaagtcttctgctactagatgctcacttatgtagaagatttaacacttactgtgaccaaaaaagaatatataattcattttctttcctcttaatttgaattttttcattcaccttgcagtgacactgtgcctgactctgtaagcacaatcacgatatataacccttatgaatgggacacaaggcaggggaagggcagtaagtgttgacaaaggaagacacaacaaagagaggataagatccatgtgctagagtgctagtcaatcagccacaacatacagttcagagggcttttaaatacccagaaatggaaaaattgatctttttccatgtacgttcttattctgggggtcaaagatataaagatgctgctcttagaatactaatggttttcaataccctgctcttttggttgtgaatttccttgtttatttacactgattttagcccattatcatgtattagtgcaattatggctcattacataattagtgtaaatatttgtaggcatgtaataacaacatgcaattatgatatggaatgatgtcataaaaattcttatcgaaaagtacgagtgaaaaataaaacaagaagtagtatttataggtgaacaacagtagtatatcttcaggtagagacaatctattgtacttattaacttaaaaaaaatcttccatacattctctgaacacgtgtaaacagactctcatgctatcaaacaccgaggttttaagtgctgccagcagcaatcctccaaacgaagtaaggataaacctcaaacaatgctatgagtgtctgagattaggaaacagcagagacaccccattagtaaacatattctatatttgattaggcatttggaagttggacaaatgttttgattaaaacatgggattcattaaaacatgtgtcagtatggctgacacgcaattcttcaaaggggcccctgatcagataattagttttttgaagccagagtcatatctttgtcctttagcaaagtgctgaacacaaagtaaacattcataaaggtttgttgaatgaatgagagaatgaagaaatcataatttttctagccttacggctatgcccaatgtaaaaagtgactttttttccaattcatactttattaactaccatgttaggttctaataaatctttgaatatctttgaagagtcattcacatcgacttctctgtacaaattcagtgctattacaggcagtagaggctttaaaaatcttaattagagagcctaggtggcatttgatgggattaaataccatagtcaacagataaggatccacaggacctaacaaatattgaggaatgattcgtaagcacattggaaaactaagaaatcatattagtttaaaattcaaaattaattctatcatacacataccatttttcccatgtaaagaaatacatctattaattttgaaatataaataagaaaacttctcaagctaaatctcagcttctccctcctcaaactctgatgttgcagggtgagttgctcagggtgagttgctttatcaaatgcatttctcggaataagtttcttttcctgttttaaaaaaacaaatctaaaccatgtcctggtattacatcttaaatatattttgatagtgatgatttgagaaatttaataaaactagtttgctttatacccattccatttcctccatgcaataatagctgttgaaatatttcttccaagcctttctggggaaattctgaaattattttactttctgcatgattcctgtaggatatttggtacactctgagggagcctcaaaggaataattaatatctacagaaccattcattcatgaacatggaaggagggaaaaatactgaatttcatcatgtaaaatatttaatatcctgtttcttgtggccaatgtccaggggctttgggcttcccattagaatattttctaaccagatgaatcaaagtttgaagccgtttagaaactttgaaagggccaactgctctatataatctttttttcttgggataatgtgtttttaaaaacctccttaaaagaagtaatctggcagtcacccactggccattttgcagtcccagtattgttcctgtacggggaatactgggagctcatggtccccatggatccatgaactccaccgctaatcccatggtagtacacttaacagcaggttaaaggatgatgagtagagatgtgattttgccgttatcaaacaagtatttatctagtggaggtactgatttaacttgctagcagtttattcattccaagttaaccacttcaaagaggcatataaaactaaccaagcaaattgtttgctttttgtgtagataaaggccttaggcaaacaatttatacaacacacaccaatgaggacagtctttcactttgggttgtaatatgccatcattctataataaagcaatgctttcttggcaagcagggggttgagcaccatagacaaccctcctcagtgctatgcaaaggaaatgcatggaaacaatgtcgtcttggtctagcaattacagaattccaaattctaccctttatacatatgtcatctgtatctaggctgtcctaattcggaaatgcaaaatctcatttctatatactggataaaagaaagagttttagttattcctgagtaggtcttaagaggagacagaatttatccacttgaatttcaaacttttctctaatgttaacccaccaactacttcatgttgactttttttgttagaagaggacacacacacacacacacacacacacacacacacacacacacatcttaagggaacttctggcactatgttttaccaaaagggcatgcaaaagttttagagtcatccaaatctgatcaacttttcaccctgggttctagttctgtttacagactcctcagctcacattgttggaatgaaacaaatatagccagttttgctttgatctgtggtcagtttagcttttcaatcctggcacaatggtgacatttaagaggcaagaggataaaattattttcattccagcgttttaaacaggataaagacttataaaacagctctggccaaatatgaatttggacctaaacaggcgatctcttttttataagaagtccttcttacactgctggatataaatagaagtataaatagttaggcagttaaacacatccattctgatttatcagtccttatcttcagaagcaaaattattggggaaattgggggaggaagaattgcaacaaaggaaaacccaaaaacccaaatcacggtgaaattggtcctgtaaacacatctgccactttccagaaaatatcataataactttgaaaacaattaggcttacagaaaacaaaacaaacccttgtttatctctttactcatcactcaacagtaagttgttccaatcactcaaattcttgctgcctcacctgtaagctcagccttctaatttgacagcagagaccagttacaagagatatgggaattgagggccagcctattaattcatcattgaagaacctcattcatttcaggacaaaaggtctccttcctccacctcagcccccttttccatttttatcactcttaaaggaaactaaggggaagagaaggagaatgaaataactcgaagggatattgaatggcatataagcaaagccccaggtccgtgagattgcctaacagacacatacctatagatacaagcttgtgcggactaataccacaagttcggatctacgggtttgtggcaacaggcctcaatatcttctctcttttggggctgtgacatgtctgaaaataaaatattacaaccattaatccaataaaagagtctaccattcaattgttttatgccataaatggaaaggacttcgtcccactctcacaaaagcaaaagttaagcaatatcttctatgttctccccaacgtgcttcccttggtttccactttttccacaaatccagtggactttaggtaaacctcatcattttactgtttatatatggaagactcatttattcactgctgaacacataatctgggcaaagtgataccaaaatggcaaaccagcagaataaagaaaattctttaaattgtaggcagagagaaagaacacatgagagcccaaatgcaagtccattcctttaaatacctgtcattacattaaaaatgatggtgaaattttcattttcctatttgcattctggaaaacaactagaataaacttagcaagtactaccaacggatttataggtatattttttttttttttgaaaaccactctagagtagattttcaggtatattaagatccatcttcgggaaaagtttgcatttttgttcccacccccatcccatccccacacttattattgattcaaacaccaacaatgagcaagtttgggtgtactctgtaaaatttgaaccatagaagaaattacatagttgttcctccttccccccgcaccccccgccccccgcaatactgtttgaaaaaacagggatgaatctgtttcagagaccttcttataaaatgattgcatttgtcaacataacattttttttctgcaaagccaatgttctacatataagaagggaacatccaagacaatggactttcattaacgacgccttttgtgaattgtattgaagacaggcataatcataagcacttcagggacatatattatacagctaaataactccctgtcctagatgctgggaaacacacatgactccatccctttacaggacctaaaaagagacctttttaacttttgttagctataattatggatcctggctctcaaaataattatctcatttgcctcaaaaaatggacattcactcctttctcaagaatctggggccaggcactggtggctcatgtgtgtaatcccagcactttgggagcccaaggctggcagatcacttgaggtcaggagttcaagaccagcctggccaacagggtgaaaccctgtctctactaaaaatacaaaaaaattagctgggcatggtggcgtgcgcctgtaatcccagctactctggaggctgaggcatgagagttgcttgagcctgggaggcagaggttgcaatgagccgagattgtgccactgcactccagcctaggcaacagagtgagattttgtctcaaaaaaaaaaaaaaaaaaaaaaaaaaagaatctgggagatgaactgaagccctaccaaggggaacaaaaaaagacagagctgaattgaggaattattcagagaaaagagcaggccctcgtgtatgcaacctaaaaagttaaataaagagaacaggaaaccaacagtacgatgaacagaaactgagacataaccattcatagatactttgttgtttccccatctcatcacaagtgagctgtggtacaattgctcagagcctgctggtgctgtgaaggttggcaaaactgagaatctagttgtagctctgtggcttaattttcagatccaaagaaataacaatagcaagtggaagtaagtagtatccaaatcagtcacccccagatggtctttatttattttattttaaaatgttcatttcctttctaaaataaaagacttttaaataagctctgagctgcttcttttccttccgtctctctgacaaaggcatggggctagaggtatttgaggatggccactttgaaccctgttaaatattgctggaatgtgggggatgtaggtgctcctattataatggagcagaataagcccaacgtcccagagtaatgagaatgaattgttatcatcacgcttactagaacgatacaatatttgttagcgatagactaagatctatcaaagtggtacactgagacattcaaatagcaccactttcataaatttgcatggcgctcttgacctccacagaaaggagctcaatgctgcgtttcagctgggggcagctctccctttccttggcaaatatagaacagagagaagtttttcatttcaaatggtttgtagtgttaacctccaaacaatccaaagtttccattttagaaaataaaagagcaaccagaagatacccaggctgcaggaaaaaaacgagaagaaaatcaaatactgacctagtaaagggatggtttgtttgggagtagatatttttcttaaagtattaattgaatacgtcctttaagaatcttctttgtgttgaggaggaaaatgaggggtttttttcagaagaaattttggcttgcttcattaagcaagaatccgtgggctctcttagtaatattaacaagttggaaaatatgggttaatgctgataagcagtgacaaaggccgagtaatgtaacttataaagcaaatatataatttatgttattaaacatttttaggtggcataaagcccttcaatgacactaaaaggaaactgcctgtatcatgaaagctaagatcaaatcctactcactgaatatatgcatgggaatagtttcataaagtgccatatagtattgccaatctatgactaaagtaaaaaaaaaaatcaatattgttattatgtaatttatataagctctatcttccaggaattcagaacacatggtaggctttttagagccaatcctgtaatacttatattttttcattcaaatgcccaagatagcgacagagttaaggggcagtgcctgctagtttcaaatgcttatgattgctcagagcctgctggtgctgtgaagtttggcaaaacagaatttagttgtagctctatggcttaattttcaaatccaaaaaaccaagtgctgttcagtaataaatttctaaaaattttccaaactccatagagttgaatgtcatgcctgctctactccttggctaggaaaattataaaactggtttcttttttaaaaaattaagtttaaaatgtagttattcttcataattaaatcattcaagcatgccctaaaaatttgcaatacttgaggaagcgaaaggtttgggaaaattacagaaaaacaccattacctgaaaaaggtaacttcttatgtaaaattttaaacctgcttccatcttgttaggctaatatcttcaaatcatccacacgcgtctggaaaataagacatttacaatattttaaaatgggttaagaatttttacttgtttttcagttgtttttttttttttttttttttgccacccaactcttttgtaaagttgaaagtaacactagaacaagagtaaaaagaaaaacaaaaactgaaataaaactatttctagaaaaacatcgggaaccattatgtttacttcatttccagaactacgcataataaataggttctgcaaataagtaatttcacaaatctttcctggaattcccctggctacgcttggaccttgagaacaattttaccagaaaaatgatcaaataggaatgtgaagtctcggaatactcccatacttttgtacaaatgttttataccaaaccactcacttgctaagcatgatgaagagataggctatctatggttaagaatagtttaaggaataatcaatgaattgggcagtgattacctggcatgatgcagcgccattgagacatcattttaacttttttactgtcaaatgattcaggagtcattatttctctcggctgatagggctgttaaaaagaagcaagtatccgattgtggtggactcatgagtctatgcctctccaccacagcaggattcctggcttccattccagtgtcctttcattggccatgttttggacgcggggttcgccttcccttcattgtccctttactaatggaaggcgaactcacagtgcagctgcttgcaaaaaggaaaatttatttgagttttgcctggctgtggacttgaacactgaatccatggtgacatcagcagaacgacaccaacggaaagatttcctgccctctaccccccttcctttttaaaaatgtacgtcttgtacaaaatctcagtggatctcctttgtcccaaacagatgggacagtttgaccagataatattttttatctgggaaggacaggaggaaggaaggaaggaaggaaggatggaaggaaggagaaaaaaagagaaaagagagcggcacagagagagaaaagaaaaaagagagaaaaagaaaaagagccagagacagagaaaggaaagaaagagcaagatagagaataaagaaaaaataaagagaaggaaaaaaaggaaagaataaggaaaggaaggaaggaaggaaagagaaagaaagaaggagaaagaaaaagtaggaagaaaggaaagaaaagaaagagaaacagaaagaaagaaagaaagaaagaaagaaagaaagaaagaaagaaagaaagaaagagaaagaaagaaagaaagcttgttcaaatctaacctttgtcgttcactctgacagtgggtgtcccctgaagcaggggagacactagtgtttggtctcctacagcttttcagtttttctgatcgtttctctcatcctttgcagtcactggtttttgccaaaagatccaatcacctcaacaaaagaggcacatccagcaattgctactccaagagtaattcattggtgccaattgtcgtgccacgttttatccacctgggacattgccacaaggatatcagaccacagagtgggagcagcgctcaaggatatgacgcagaggcttttggcatcaaaaccagttagcttaggtagaactcattcctttttacaaggaaaaactggccagaaggcagtagggagcgaggagaatggcaaagcaatgccatggctttcatgtttctttcgagcaaatggaacactgaagattgatggatatttataatcttcatctcaccacaccctgcccacactaaacaatattttatgaaaatgataaatgcaagtgtgtgtagatcaagcaaagagaaaagatggaaaatggtataatagaagatagatcggatgaaaacaaaagacactcttagactatttgaatagtgagcttacttttctgtaattaaaaaaatcttaaacccacttaatattcacttaaaacaggcatataacagaaatcaactatttgagagtgagaaattgatggcaaattcacttttgacacactagatgaaacaaaagagagactttgccagtaccaagttgtatcgtgtgcgctggctaaggtatactactttcacttttgaaaggaataagtttgctcaggatgacaatttttcttcctttttaaaatgcaaacaatgatgccagcctacaacttcctttctagctattttgctaataaagcaggggaggagaattgaaatttgaaaaaataacaagaccttgattctgacatagaaacatcagacacgtacttttaaaaatcagatgactgtcatctctttaatagaagtgaactatatgctatataaatgcttcctagacaccagccaactttaacactttctgttcaaagctatgttttgctcttgagaaagtatctcacaattagatgagaaagtgggtggataggatggcttgggaagatttgaagattgaatcctgcaagaaaagagatacataatatgtaaagagtgagtatttcttgagggttttgaccgcatgacaatggagtcttgttctgggaaagttatagaggagcctggaacgtccaaaatgatacttataaaaaaaaaaaaagcaaccttcaaacccaagaaaagatgttcagctgaaacagaaagaccttttttcttactccagggtgcagatccactcagaggaaaagtcacacacccctgtctctctgcatttcacccagcaggtcagcgtttctccacctagggctctccatgtctattgatttccacatgtctctctttgtttggaacaacaaccaaccaactagaagacgattttatatactcttcaccaaattgaagttgggaaagaaaaaaagtattagactattttccttacttctcgctctcaacttgtcccaaatattgatctggttattttgctttctagccctccatcaacctcctaactctttctctctctctctctgtctctctctctctctctctctctcacacacacacacacacacacacacacacatacatacatacacacacacacacaactgctgcttgatccaatctggtgcctgcttaacaacaagagaatgacaagcaacatctgtttgtaaaagagccaaagtcaaaccttaacgtttttttggctaggtttcttttttcctttttccccagactctaaaatgggagggggcagaaagagaaatatgaagatttatattcagcatcggctccaatgaggcagcatctatactcccctagagctatttcaaggtaaaaacaattttaggtaaaaccactgcagaatttatggtcgtctcccctgcagcaagcccagccacataaaatccaacatatcaaatccctaaaagtcaggattttttcctaatagctttatattcatcttctaattagaattacagggtctttgtgttgggggaggggtggtagagatagaaagggaggagggtaagacagaaaaagaaaaatagagaggaaaggagcgccgttgttcctcccagattttataacccaggcgtgtaacaggcatatttacacttgtgccacgcacaggatcgtgcacttgaagcagcaaggctgtggcagaaatctgcacagctgtagccatcagaaacaggctcgctcattcccccacggagaggtggttttctggaaagctaccaacagaccacaaagtcacaatgcaaaggatcagagctccctcaatgggaggggccgggggtggaagggaggagaaggagctggtaaaaaagagaaagcctcactcaccaaatgaaacaattttgcccccaaagaagggaaataggggactgtcagaaactcaactcccatttcactcagggtttggaataaacccacacacattaagggaaaaataaatgcagacaagttgctaaggagacttgtgtaaactccaagcgcagacatatttcttggcctttccccctacgctccatcttgtattctgatcacgctgctctgcggcaacgttgcaccaaccttctgcattaatcttggccctaaccgtgcattctggcaaagcacacgggttgtagatatcatcatctttcaaacttaacaagttaaaagggtgtgtgtgtttgtgtgcatgtgtgtgtgtgtgtgtgtgtgattagttggggggaaaagtagagaaatcttaatttggattttaaaaacataggtgttgaacaaagaatatttacagtgcatattttgggagcaatggggaaaggataggtaaaacatctagcactggaaatttcctttagtctgtagattccttcatttctccatacccctatactttttccccctcccacatctttggttaaaatcctgtgcccctggcagatgcaagcagagcctgcatcactgcagatgacagtgtaggggcctaggcttctgcagaaaacagtgcattcgacaaagttgaatcctgctcccctactcagggtgtcccagagagaccagctttttgaaaacaaagggggtcaattcaaaaaaacacctaaaccaaacctgtttaggttagaaaccagctagcattttggaggagggatttcagcctgatgtccacccgctggagctgagagcttgtcccacagtgatacatcttcagtagcagctgatatatgtcaacatttcatttagaagaaaattaacattttctttcaggacagggatgtttgtactgtagaagccaatattttcctttctcagcctctcgtattagaatttctaaaatcttccccaggacagagagagggcagacaacaaatgttctaaataattgctcagagcactggagcaaactatatgcccccaaatcaaatctgtgtgtaggtttacatgtgtgactttgcatgtttgcatgtgtgtgtgtttacatgtgtgcacatgtgtgttaatgtgtttgttcctttgtgtctcctctatgtacgtgcgtgcatatttgaggatgtatgtttgtgtgtgtgcaagtgtgtatgcttatgtgtgtttgtgtttttgcaggtgtttgtgtgtatgtgtgcatatgtgtgtttgtgtgtgtgtgctcgcatgtgtgtgtacttgtgtgtgcgtgtgtgtgagtgtgtgtgtatttccctgcctcgctatgatagtgggattagtgagatgcacaccaaggcagttggaaggtgagccatctgctcagtcccttctcaaattagggaagttcaaaacatttgcccaccagccacaacagaaaagctccagtgacgagcacccaatcgagcctgctgatttagttgcaatccttggacgggtggccatgggacaagatcctggtgaagggatgggaaaagtctttgcattctgcaaagggctgggtgtgtctcttcatgctccaagaaggctatgcatcttccatctcttccctctgccaacctctatttggttttcacacttcaaggctaaagcaagctgtgctgcctcagttgaaataaggccgccaagcaactcttaagctagcaagatggagatttggctcccgccatttgcagagaaaggcactgtcctgtaactgggcctgcttgcctaccctttacacataggagccctcgattttagggaaggggacatcattggagttttttatgaccttttccctacaaagcatatcctcagatgttttatggcactaagccatcatgactcaatcaaaatgaaaaatgaacctggagggagaagctcagggtgggcatatctcagcaggcaactgggcaattaccctgtgacctggttggcctgggggcagggcagtgacacctgcattttttcatttgtccatgaaactgcagtagcctgaatcccaggatatcctgcctaggcacctgttggcctatttttcctgcctgctgggattgagagaattgtctcaccctaatgtgaagacatatttgttaggatactgcgtgattctatatgatcaaagagaggaagaactaatttacaggatcaatgcaacaaatgatcctaaaatagaggattctttcccatgtagattgccaaagaaaatgctttctattgtaagttggctcactgctttctcaaattctctaaagaacagaaaacacatgagacacctttcattctaccaccacctcccctccctccaaccttaccagttcttcgtggaaaaatgaaagctattaggaaagaaacaagcaacatggctaggccagcctggaagggagactgcaccagacacataagtgcatttggataactttcagatagaaaaaatatagttttaaaaaacatactggaaaatccttaagaagcttgtttttttgttgttgttgttgttgttttttgagatgcagaaggaaaaataaccaaattaacagtggctggaaaattaaaatgctacccagacacatctcaaagaataaagtaacacaacttctatttccaacaggggtattgggacatgtttgcatatatgtgtagatttgtaagcagactcaagtacttgtcatccaaatctctcacttctagccttgaagtgaaagaacacatctttttcacattgtgtaaagtgaccttcctttactccaccctaaaattcagttttatactctacatacaggttaaggaacagaatgttctacctccatcgtttatgagctaatgctccagattgtgaaatgctttacacatcattcagcaattgtctcccaagtccagttggtattatcactccacattgcatagagagttgacatagaggaaaagttaagtgtctttcccaagctcgtatattattgtaatgacagctttagaattcagatttttctcccctttttaaactggtgagagggttctaggtctggctgaaggaatttggaggtgtcccttccctcattctgcattgtcagtcagctgttttgtataacatgtaatcccaaggtatagaaaaccccagccatgtggccttcagtgctgccatcttgggtgaccccaaagaataagcaaccaatggctcatcttggggactggcatcagagataaattcaggttgagaatggtctccagacatgtattctactcatgccaatccattggcacgtttctgtcattctgatcataagcaacagatgacaggcctcactcacaattctgcaaaatggtttatactatctagactaaaactaaagcccatctttccattacctgagttaattgtcaatgctctccgaatttgtattgtttttatacatggacagggttgaggagaggacaaattcaagatttgaagagagggtatcaagtacaaagtatcctatgtaaaatatttatgttttctatatatccacaagtcaagtggttattaatgtatacttaaaaattgctagtgtctctcggggggcattcaaatggttaagatgctattcttgggtaaaattaatccataatataattacatctgtattttcatcttacataaataatttatttctgacatttaatgcgaaccagacatcacctcatggatggctcatagaagcagggtcatatttcccatttcttttggtgtggtatttttggggtggtaggcaagaatgggtggggtaagtggaaagtcaaatcttgactcgcatctaaatgatttgtaaacagaaaaggctgggaaaaatcacagatgcagtccaaaactccttctgcagacattttaatcgtaccatgagaagttgagatgccaccattttttacttttatttttaaaaattaaaccacttactccaactctaatggactgattggggctttttggaaagtgagaagtattctgaaatcatgtctgatcttggtaggaaagagttttataagcacttagtaagtcatcactgccatgggggaagaaggttgatgataaaatgtagaccaaatatttgccattcctggctgaccccaaactttttctgtattggcaggtctttatctgtcccatgacaatgggagaaagctattcagcagcttctctgtgatcagtatttggattcctgagaagaatatttttattattatatcatttctggacattcttgctaataaagaaggagttcaggttgatttttatcttgcattaaccaggtctggcacattttattcacataatctttagggcacaatctaagttactagagcaaggtagaaaaaaaacacaaaataattcccatccccttttacccatcactggaagatacaaacctgctgatagctaagcctctgttaaaagcaaaaaatcaagaaaaagagaaagtctggtgcagccagcaccctcaaatccattaatcctaagtctaattctctttagaatctaagtaagacaatatattttacaacaaaaacctctctcgggccaatgcaacatgacaagactggcatgactatttcttctgggaagactgggaaacaaactcttggtgatgagtgagggcaagcaagggcgagaagaagccattgtaatgagctgtggatgctttccatcttaccttattgactttgccaggctccctctcgctacaaggttagacagctatggccgaataggacataaaagtagcagacttgccctttatttaggacactcagccacaaacagaggcaccagaagaccttaggccctaaggaagctttatcactgtgaacgaggtctcactataaattcaaaggatcactaatggactgctgttcctacatggaggtgaagcctcagtctaaggtccaagtaattcaaataaaagtcccttttcagatacagatgcctaaaggcaccacattacagactctctcactcctattgatctagatttctctgctgaactcatatggtaggccatgaaatccaccttccccagagacaaggcagttgggtattgattccaacctgcagggaaacccactctatttccacatttccaagatgaggcagaggacgctttcttccccttagccctcaggagctaccataatggcccacagagatggagactttccagccattgaacagaggtcatcggtcctttttatgagcaaaatagatagggctcacaggtcctcatgaagttggaccatcaactagttcatccctctgtcaccagcgaggaagaaaaatgtgttctccagtccctccccactttcagtacatttggtaaatgaacaggaagggtcagggccaccagatgtttttcagtgacctgtgtgcatgcagccagggattaagatcaagttgctgatgagttttcctggtggacctggagtccccagcaaaagcaatgaccacaggagacaggagcccctacctctgaggtaggaattttcaaggagacttagaggcttgacctccaaaggggaagcctggttggagattacaaataaagtacaataaaaactctgtctggaacaggtttacatagaatcccctgggtaacaaaaaattatgagaaattccatccaggagttgagctgagcatcagaaccttcatgtctgcacatctgtaagtcctattagtgcttataagatcgacttgcccctggatagatttgggaaatgcagttaccctgaaggggccatgacaatatgagagctaacacatggctgcctcaaacctctcctcagagcttcctttcgggggatatgagcaagtagattgtgagctccagggtacccccatcctaaattatcaccccccccatccatgtgcagaagcgtaactgcgtgtctccccagcaactgcttagtcgatgccagtttgcaggtagagatgctggcattttactgctgaaacccagagctagattttcttcttagcagttcacagcccctctagacccatggcagacaaaggcatcaccaaatcctcactaagctaacataaaagccctgaaaacagaaacccctctctctctaactgcctttcttataacatatggccaactggcctcactaacgctaatacgacgaaattcctatttaaacatcctagcggagggctctaatatggcactgtctctactgtgcattttctttcttttttttttttttctgttagatctctgcctttactagattcccacttccctgcacacacatacctcacaaatgggctgcgccagatggactcttaatcatagtaatcagctgggaaattaaatgttagaaaatccagctagtctcctgaattttcccacttgagattagggcctgagctgtcaccatgtcctatatgagacccaagctgccttttaaagaaggaccaatgtgacagatccagtatgggcttcatgctttatgggtgtttgtgtttctttcccggaaaatgactgcagctcaattcagttttgtttcagttctgacggctgctattaatacctcctatttacagaacacacacctcagaggagctcaaaacatttacagaaattaaccaagccttgcaacatcctgtcaagtatgcaggggctagatcttactttcttcatttcagaagaagaaactgaattaagagggcaattttttttttttttttttttttttttttttaccatgccacaaagacaggacctcattaccccctcatttctggtgctctgccaaatgaagtaggtgttgttgttttttttcatagtgtactcaccagcttgttatgctagtatttttcagacacacacaggcacacatcatgatgtaaaatcctgatgtgcaaatacgtcttctttctataaatctccccacaagtgttatcacaggtttcctctagtaggtgatcagtgagtatgattgattggtttgcaataaacctaacgtctttagttttctccatcttttcccagaaggctcctagatgctgctcaaatgttgcttcctcaagtgactctgaggtcccatcaacggccaggtttttgatgattctgttgtacccacctcatccagctctcacctcactggaactattaaaaggcatcatagtaaaaagaaaggaactttgtagtctttgagatagacaggactccatttgaatccaaggtctgccattgggggacaaggtaatgaacttttctctatttccttatctataaaatgatataataatatctacttcggaatccatcaggatgctatttgtaaaaggtgaaaatgtaaacgatttactattcatcaatatgggaatcatcagatacatcaccagtattgatgaatatcaatgctgagggatactctgtagcccttataaagaaatactagacatatataaagcaagaactgacaaagaaatacttttaagacatattaaatgtaaagaacaagttgaagagaatatatgtgattatacatatatatatatatatatatatatatatatgaaatattcccaaactatgcggttataatagtatacaggcttactgaaaggcagggaatgagataggtgaatgagataaactgtatgacgtatgtataaataaagtgctcaagaaatggtagttacttctgttactattatatgagttccttggaggtgtgactgtgttttaatcttttatttgtagctcctggcaaaccacagaggctgactgagtaaaagaaaattactcaatgaatgactcaatcaggaattaattgttgagtcagtaaatacgagcactaatgtgaattacaaagactcttatgtattgtttggaatgttttcgaatgtagggaggcaacatagtcctttgggaagaaacaggactaagagtcataaggccttgattcttgattagtgtttcttaaagtgtggtctcaggaccacctgcagccaaatcacccaggaggcttattaattattaaagattcgtgggacccacccctgatctgaatcagattctttgaaattgagatcctgggatctgtgttgtaaacaatttttcttttttttcagcttttttgaggcaaaattgacatatagaaattgtacatatttaaggtgtacaacttaatgttttgatatatgtatacattgtgaaatgtatatattttgatttatgtgtacattgtgaaatgatcaccacaatgaagctaattaacacatccattacttcacatacttctttctctttctctctctttcttcctttctttctcttttttgtggtgaaaacacttaagatttacctgcttagcaaatgaaagaagacacagaaaaatggagacatgaatagtttcttcaataaatgatattagaaaaactgcatatccatatgcagaagaatgaaattagacccttgtctcatatcatatacaaaaatcaactcaaaacaagttagagacttaaaagtaagatctgaacctgtaaaactactcgaaaaaaaaataggaaaaactatcctgacattggttcttggcaatactactttggatatgacttcaaagacacaagcaataaaagcagaaatagacaagtaggatcatatcaaataaaaagcttctgcacagcaaaggaaacaatcaacagagtgaaaaggtaacctactgaatgggagaaaatatttgtccgtcatatttctgatgaggcgttaatctcagtctatttacagataaaagtttgagaattgccggtttagatcatgttctgacttcctgtttgactttgggcaaatcactaacctttccagaatatagtttcttctctacaatgtagtggatggatcttaaatgcaccttgaagttgtaaaattctacacccatgactaatccaattccctgactttaggtaggtctgtatataagccatataaaatgaactattcaaacctggtttgagctgtctttggtccttgggctatcatttggacacctttcaaattcagaagctgcttcctattcacccatgctccttatagtctttaattattaaaaccaactagtaaggacattatctgagcattggttctaaatgattaaaacataccattttaatttctaatacatttgtatcataattataataaatatattaacataataactataacaaataatataacaaatatattctctctcacacacacacaacacaacacacacacataagaaaggtagaataatataaaggctttggaacagatatgaaaaacaatgttagggaaagattactgaaaaatgccaataaaatatctctctttggccttgggtatttatgaaataagaagaatgtgtccagccatttttatgaaaattaaaagccaagaacacagatggctgagttgaagggagctgtatagcatattttaagtgtagaggacaaaaaatggcaagtgatagtaacacccaataaaccccaaaggttttagaaggcaaaatccaaaaccaaattaacttttccttttgtcttcagatacagaagcgtttcttagagtcaccaagaaaaggctctacgtcttaataagaatgttctgaaagagatttctacctaagaaaggactttggagtcaataaatctggatttcagtcctctctaccttatttattaggggtatggtgttggatgccttccttagccacttagagccccaattttcttatctgtaaaattggaataacgatgagatatatttcacaaggctattggaacaatgcaaagaaatagcatgtgacagtgcctagccttgtgcccaagatggattgagatttcagtcaatattgaaaagaaaacacacttcatttagccatggcatagaaggtaattgccccttgagccctgccttgcctttgccggtgagcctgacaaaataaagtggtgatttaggactatttaaagggccatgcccttgaaaatctcaaattgttttaattctagagtttctatgttattcaactgtgctccatattcttttagaaattaaaagcaaatcacaaaccttattataagtccttttatcaaaagctggagtctaaagactcagagacacattgaaatgtatcttataagggaaggccaaaattattgatgctaacacagggtagtgattttgggctaatgaattactagggtctagaaccctgtctaacacacagcaagtaccaaatatgcactaaatgaacacaagattggatgcttctagctattttaaaagtgggaacagactttaaaaaaaaggttaatagagtatggatagtagagacggtggggctaaactctaaaattcactggaaatcttaggtcacggttaaacaagacatctggaaataagctagtctaccaataacctagattgctgatgctatttaaacatttgtcataattctagtaaactcaccgctatggtttgaatgtgtcctctccaaaattcaggtgttgccaatatggtagtattaagaggtagggcctttaagaggtggttagaccatgaagggtcctctctcatgaatggggttaaggcccttataaaagagacttcacgcatcattctgccatgtggggacacagaggaggctgtacccctctggaggatgtagccttcaccagacaacagaacccaccagcaccttgatcttggacctcccagcctccagaaataggaaaaataaatttcaattttttacaaactacccagtctgtggtattctgtcatagcagcacaaagaggctaagacactcaggttctgtcacctcaacaataccaagcttttccttgaaaaagtttctaagggagagagttaaaattccttaagtgacagccaccatcttcagaattctttgggcctaaaaaatagagtactaagagcctttagatgtggtttccgactttcttactgtccctctccttccatattactctctcactctcatgtctcccactcatactcactctcattttcacctctgagttagacatcttggcctgcaccttccttagacgcagtctcacacatttcttgttcactgccatgtgcccatccctggcatactttcgggcatacagaagtacacaaaaaatagttgttaaataaattacatattagctgaacaagtcagggagatttcacatcaggtagaaaatctcattgttttatctctaaaagtatcccaagtcatttgtactatactccactgtttctttttgctaggcatatattatgcatttcatgtacttatttgttcactagcctatggactgtgagagcctcatgaatgaggaaaatatcttcctcctctgcatcctcccacaaagagccacttcaaggctccacccacagtggtttgtgattcaccaagcatggctgactgactcagaaccaacatgatacttgcagcccactctggaccttccatgggagaagggaccacatctcactcatcctggcacttagtccagtgcctgacacactaaagacacccagtaaatattgactgaggaagagagagaagcagtatgagtgaataatactaaaaaaatccaaatgtttcagcaaagccaaacatgaagcaaaataaactagtgtgcttcttccattcattgtatcctgcattcattcaacaagtatctactgaatgactagtttgtgccaaccattgtgcttggcaccagtgacttgcagatgaattatatatgagtgagaaaacaggtctgcatggaatttccactctagcgaggaaggtggatgatacacaaataattgcatgtgtgctagcattgtccatgggcaatgagaaagtacatctcagccaggtgcggtgcctcaaggctgtaatctcagccctttgggaggctgaacaggtggatcatgaggtcagcagatcgagaccatcctggccaacatggtgaaaccccatctctactaaaatataaaaaattagctgtgcgtgggggcctacgcctgtagtcccagctacttgggaggctgaggcaggggaatcgcttgaaccagaaaggtagaggttgcagtgagctgagatagtgccattgcactccagcctggcaaagaacaagatcccgtctcaaataaaaaaaaaagaaaagagaaagtacttctcttgtagaagtgttgaggaagcacaaaggaggcaggtgagcagggagagatgaggaaaggaggaaagaggagactaaaaattcttcaacaaaattcatctgcctctgcaacaaggaacttcttttttttattttattattattatactttaagttttagggtacatgtgcataatgtgcaggttagttacatatgtatacatgtgccatgctggtgtgctgcacgcattaactcgtcatttcgcattaggtatatctcccaatgctatccctcccctctccccccaccccacaacagcccccagagtgtgatgttccccttcctgtgtccacgtgttctcattcttcaattcccacctatgagtgagaacatgcagtgtttggttttttgttcttacgatagtttactgagaatgatgatttccaatttcatccatgtccctacaaaggacatgaactcatcattttttatggctgcatagtattctatggtgtatatgtgccatattttcttaatccagtctaccatttttggacatttgggttggttccaagtctttgctattgtgaatagtgccgcaataaacatatgtgtgcatgtgtctttatagcagaacttcttataaagacaaatgtgctcagtacatcagtcactccttaaacttatggcttagtgtgacggcaaattgtgatatagcaaacagatatattttatgcattagcaatattgacatgcatcagccaaaaaaacccaacattcccatttgattgactcatttgacagattcaaatgcctgtgctcaagtgtagtctgggctccctgaccttggtactaacacacgagatgtttcagtatgtttcagcaagttgttagaagtggtcagattttgtttaacttagttttcacagagatatctgttgccttgcacttggcagtcagtgtagtatttttcaccagggattcaatctcagtgggaaagagtagcagggatagaggatgaggaggaaaggcatctgggaaattttcaaggtagaagcacaggaatttaaacactaaataaactacttgaaaaaggaacccagaagtgagttacaacattgttttagaataaactcaagctcaagtgcaactactttaaacatcaagatgaataaaaggaaaaccaaggagttccagtatttggccatacacaaccctttgatctggctctgacaaatcgtctctgttccagatttttacctcccataaccatactggcctgccctataccagaagtgaagtcatggaccctgatctctaacataggacctttgtatttgcattagcaggaaagatggaggaagactcaagcttacatatgtggagaaaaaatgagtgtccccctgtattggcctgtatacaaaaggagtgcatggaagcaagaaaataaatcttcaaacagaatatttcttatcaccaagcatgtccttttatccaggttctcagaattttcttttggtcctaaggagttaccatgtagaaatacagaggcagacagccaagggctgcaaacagtcctaccacctaggtggaagctctggataagttgcttaacttcctcataatcagttttttccatctaagacatgttgagttggagagtacataaagtcacctggcacctatagatgtctaataaatatggattactttttctcattccctaacagaaataccaggtaagaaccaaggttgcgtttgcttaaatgtttttgtaaaacaaggagggttaatgagcagtataagcaaggatacgaggaacacacctgaaatacagtattgagtaaccgaaggtgaatacaggactcttagagcaatacaggaaagaaaaacggcactgttcctttgggagataaattctttgtttcattctcttttgctcttgtgaccttcctgtttctatggtccttgcacatgcccacttgcttctgaatgccccaatgcccaaggctcagtgacacctcatgaagaatttggctgctgtagggagctatatcccagccacgctgctatccttccaccctaacttctcaggcgagtcctcccactgggacaacaggctcttgaaacttcttgcagcacatgctgttgcccttacttggttggacgcccctgagtcaggcaggcccataccattctaattttgcttgttatttcttttatgaaatccaagattgagataaagagggaagggtgcacatccacaagactgctgtggcctcctaaagaattgttctatctgaacgaatgtaatgagaaaactgctaagaaactaaatggcaattcacacactcacaaaggttcactcaaaagtcttacatccatagtctgtaaaatttctatttgtcatagaaaacaaacatagaaggcactttcttttagtggtttttcagttaactgagcttccaaaatattatgttcatcaacacgttacacagaggactattgtattttccttatgggcataacataaataaaatataaataataagttatttacattgtaatataaatatccatctaacaaacatttattttgtttgtttttattattattattataaccttctgtggttaagcaatgagctagatgaacagaaatgcatacatggaagaaatttttatattctcttgaatagtatttattgatatagtttagatacagatttcatgaatatacagtgaaatatcctgccacatttttcaagtgcatcacatttagctttcataatatttttataaacataacattttcacccttagtgcattctttcttcaaattatttttggccaatcccaccaaactgccatctctagctttaaaaaaaaaaagtgggattccccatttaagatgatgctacacttgctatggaaatattgattctaaaaagaaggactgagatcaggtagtgttggactcaaatgccaaatagaagagaagcacattaacgccaggatgatgagtgtcctcacataaggccatcctttcttatagtttccaaggtaagtcatgtttgcaggggtctttggagagaagaatgaggaataagaataagaatggagaagagaaagacaagtaaggtaggaaaaatgtctgtagctaaaatacacattacatatcattaataaattttaaaaattattaaaacatgttcatttcaaagaaaagtaacacttgttaatagggtgctgggagtctaacacgaattattatttgcccataggaagtaggcttaaagatgagaatatggcatctcagaatatgagataacatattctcaaagtggtgattaaatcatatattactgctcagtcttaaaaaaaaaaatgaaatcatgtcttttgcagcaacatggatggaaccgaatgccattgtcctaagggaaataacctcgaactagaaagtcaaataccacatattctcatttataagtgggagctaagcaatgggcacacacagacatacagagtggaaaaatagacattggagactccaaaaggtgggagagtgggagaagagtgacggttgaaaaattccctgttaagtacaatgttcactatttgggtgatgggttcaccaaaagcccagactttaccactgtgcaatagatgcatgtaagaaatttgcacttataccccctaaatctgtaaaaacactttaaaagagttgtggttaaaatatgttgatacttatgaggaatctcataatgactcagtgaatagacaaaggcaggaaaaagttaaaaatgcagaagggaagaagacacacggcactggccatcagtccacatgctctggggacatgagttccatggggctcccaccactattagctactggtttttgaatacttctcaaatgcccggtgcattgcacgatttacatatattctcatttaattctcaatggcataatgaggtgggtaatattttccccattttaatcaattttctaaataaggatgtgagacatagagaagtggcatgtctaagctcacatactcaggaaaggtagaggcagggtctaagccaggacccaagcttgccttgtgttgcttacctctgatcagtttcaatccaaaattcaaagtgggaaatctagttgtaaggaaacaagggttgcttcagaatattttctccatctacagtagtgactcttattattcattgggtctcagactcctataacaattttataaaagtggtagaccctctccttagagagaggcatatatgttcataattgtgtgcatgtgtacttttcagggatttcaaaactcttcaaaaccaaggctaagaaactgcgaactaaaagttgccactaaaaagggacctagatcacagatagaacctgaccgggatgagtgcacagaaatgtctccttggccaacccaacccagttggtgcaaatcctctagtgtaagcaactctttacaagcatagaattgacccttaataggactagtcatgatggacagagatccccaatgataaaggtattcacaaagaacacaggttacaacccaattcttgagggacccttgagtgagccagatgcagtgtgcaagggagaaggaagaacgttgctagaatgaatgtcaactttacagttgggctgtgcctcttggtcatgaccttgaggctcggagaattggctcagacagttctgaacagagtagccattttacagacagcccacagcccagcaggtcaccgctctctaactctgccatcatgacaccgccatctgcagccactgagctgagatttctcaagaccaaatttatcacgcccgagattccattcttacataagaatcacctgttgctgatgcataaatttcggcacctagcagagccaagggtaatcaggatttaaaaggaagaggcctgaataaattcaagcagatttcctctctgtgggactgagtcttgaaaaacctttgtgccctcatctgcccctcaacagagactgtcatttttctactttctgtctgcatcactattgtcgagggaatgatgctctcagagccacaggcaatctgtcttcttggaggttctgttccagctctgacctcggtttgttgcagtttatgtctcttctcacaagtttcagcttgctctcatcaccagctaaattaaccataaagcaaaaccttgactcacattactgaagcctcagagaaattggtagaagcccggagtgatgcatcactatatcaaataaagcactttggatcaatgagaagattcccttgtcttgaaaccttggaatgaatgtacaggtgtgctagatgacagcaaagaaaatgccatttgaaagcattggaaggaaggagagttgtctaagaagtggtgggatagggacaacactggatggtgggaagcatctaggaaggagggtatttccgaaactaaaaaagggccaaggccaagaaaatcacctacagttctattcagtgaaatgtggggaaattaaattagggttaacaaatatctgagaaggtctgcatctgtgaccttgggcaaatagtttccttctctgggtttccatctgtaaaatgcaggaacagaatggaggcttcttccagcactagcatgccaggatggaaggtagaagaaaaggcctttgaagccaacataattactcctctgtccagagaaatataaacaacaataactccaacagccttcagctctgcttttgaatgagttctttgcttctgcctgagaggtaaagtagttcattccttggggaaaagttgaatgtggaatgctaggccatgcccttctcactttggtttcattatgttatttcgaattattaatacaaagaacattcaatgtaagttaacaaggctttactgagtaccatgtatccaggcctgcagttggtcctctagggtagatgaagaaagagtgtgggacaagttcagggtcttcaattcccttaatctcccttaacagaggtttgcatgtcccatttcaaaagccaagcacaaaatcagcaaaaatgaggctaattgtttaaatacatcttacttctctgtatttacataagcaattgaattgaatgaaatttgctaattttgatgctcttactaatacatactgcatatgtgtttcgtatctttgttgtgtatgtctatgagaagcctcactttggcatttatagggtgtgcattggcttgattctagtcagatgcctctgggtgaaacagaaataaaagtcaatcaacaaacttttgacttttcaagcaaacacatgcttatacattttgaagttccactgaagtgcaatctctgtatgacgtgaaagcaaactaaatgaatcattttgtggaaactactctaattcctgagtatgcacattggttaatatttttgcatatctctggaacaccaatgctgcttcatattaattactggcaatgtactattattctttaatgagtacttattttttgataccaagtagatgatcaattatgacaccttcctcagactcttgtcttcctttgaggttttctaaaaccaatcaatcaatttgttgtaaatggcaatcacatccaaaatatgccttgggtacaaaacagaacttttcaagaagttaagatgatccaaatgaggtttttccaatgcaaattatcgtcatgaccacctgaaagtacttttcttaaatgttctctataaatactcctgtgtactttcaattacatgtatgtaaacacgtaaggatgatataaaccatgattccagttacatatttctaagcaccaagaatgaggcaccaagaattaaggtgcattattcttacttaagaactaatgtactataatataccatattgctatgtttttcttccaataccccaaagcactatttttggaacttgggtgttcagaattgagctgattattatattcttcggttcatgaaatgtcaaagcacttttattctgctgcccgtatggtgaacacagtaagaaaagagaggcaggtatttagggtgaccaactatcctagttttccccaggactgagaggcttttgggacatagcacttgccatgggagtggccaaggcaaataagggacaagttggccatcctgcaggtattatcattcccgtttataattggagaaacaaacgtacagagaagcagaatgtgttgcccagcttacccaggaagtgagaagcagatgtgggactgagtcctatgtgttctaacgacagccagttcacaactacacagatcagtactacttcttctgcaccttactttctccttgaactttaagaaaacccacgttgtctttgcctttttgtgtgctacccttccaaaagtgctaggttgaataccatgggcagtactgaatggggccctttgtctatgctgcaaattactcaggagaaacaacattgccactttgtgttttagagagaggaatgagacgttataattatcacagcgctctaaagcagaggaagcactagtacaagttctgtctacccaccaattatctgttaagaccactaagatatctggtcttgactgggccagatgtataatttcatgaaacaaatcaacctaaatgaacctcaggaaaaatggccaggtaaccaccttttgaaccactatacgctgacagctaacatttactgaaggcttacagtgtgctgggcgctgtgcttagagctttatagggattaattcaattaaggctcacaacaataattccatgaatttgcaattattgttcccatttcacatgtaagaaaaaggaggctgagagaggttaagtaattcaccaaagcccacacagctgatacaggttggaacttggatttaaccccaagcagtctgactccaaaacaagtgcttttagccacccagtacatcacttttaataaaaacaaccaaacaatgtttaatctgtccaaacagtgttctgacttccaatcactgaggcagtttattagggtagatccaaaactagctagactgcaaattactgtgaagcaaagcaggtatgtctgtctacctgtttaggtcaaaaggtatgaggctttctggtcataggcattaaaggatctgaagggagaaattttaatctgttgattaatttaggagattaactgccctgccaagctgctgtcatgtcttcagtacctctatttccttctctgaaaaatgtaaataatacatcctgagcttctataagaaatgacggtgtaaaacaacagaaagcactaagcaaactgtaaagtgctttaaaacaattatttcatatgttaagcagcttacaaaatagcaatttcttcaaatgcccttgcaaagcaaatgagacacagctgctaaaatgctctgcaaagaggcggaaatccagctctttaaaatgtccaaggggaaaacgcacactgtaaaattactccaaagatgaattttacaagaaggatggaagtgtcatcaagtttttccatggttaattctaaaagagtgccagcatcgaaaagataaaaaaaggcagttcttcaacagaaacctgggaaaatattcttcaatgacgttgcataatagaaataggaattaaacttacctgaggagcagaagcgaggaagccaagtttatgagttcttctcaattttgtccaaagacaagtctgttgggaataaaaaatattaagagaacttaaaaaaggaaaaaggaaaagggaaaaaaaaaggaaagtcaagaaggatgagctgtcgtggaatgctgtgaagtttgagagtgactcagcactagctaaggggcagcaacaattaaatgagtttgttgaaagaaccctaataaaactcagcattccctgtaatctcagaacaaggttgcaccactaaagaaaatgttaaactgtgcattaggggggctgtggtttcatgaagttggttgggggtgggggaactcagggctgagtcactggctccttggaggcagcaccattgggtctctgccctcttgcctgtttctctccctctctccagggagttcagttcctctacaattagccaaaagaagcaagtgagctggccattgaacgatgacaaattgtgattcacttgtagcataaattataaaatacatacactgtataaataagtcctgagatggagaggggaaaagaacttctgccacatctgggcccacgagaatcatgagtgcaggtgcctgtttctagatggaagagcaactaggttatccaaaatggatgctgagcagatttttaaaattctctgggaaaaagaagatcacaattcctcctagtaactaatttatatctttagttactctttctagccattaagccccatgctaaaactaccctaaatctctcctgttctaaactggccttggtggttgcgggtgggcaaattgttttttcattattgaaaaatataaatccttcatatatttgcacagagttattcttatactaagctcagaatggaaaccaggcagttctcctctcccttccagaatgagaattctccacctctccatccaagttacagaaagaaagaaacattttgaggctctggcatcatgttttcctgttttcatggggtcagctatagactcagtgaagagtttacatgttcacgtctttaaaaaaacactcaaagggttaaaaactggaggtttgacatttccataataagtgttctaaatgcttgtattgatatatattttgttctagaataaactcaggtacaaaatataatatttgtaagttgttctgccagccaaactgttctccttcatttataaatgaagttgctaagtgttcaacaactgattgccataaatgaatggggtatgacatccttccaagtctccaaagagttgctacaacttggttttccccttgggagaaaaaaaaagttattgttctaattgattttttctgttctgaatagaaaaaaataaattagatccttccttccttccttcctccctccctccttctttccttctttctttcttttctttctttctttctctttcttttttcttttcttttttttctttctgttttcctatttctgcattcctacaggaagagagaaggaatattgtgcttttcatcaaccacagcaagagtcatttgagtttgaaacacagctagtttttaaggaaactataccatggtcttctggaatgggaaaagctttttctttcaagggacaaaaggtgagattttctttttgtcttcagcctttaccagtacaaaagagtgaaccatctctacatacatgttcagaggcaaatccgatgactaattgcagagtaagcaaatttcttgattctgatcaaaccagcaacatgcatttgaatttaggttggatttagatgagcaagtcaataacttagaatagtgaagactgaggacttaggaatcaaatcccatggtgaccttggtaaggattttgctcttttatggacagcttagtagataaggtcagtcttttaatttacttaacaaattgcagacagctctcccattgtagcatttaatcatttcctcccaactcaatttcctcattcatacaattgggttaatacaacttactctgcagggctatcataaggactaaatacaatgtgtatctaacatgcttactacagtacctggcacataaaagctggacgaattgtttctttcaattcattctttaaattcatgcttgataaactgatgctggctatagtaatcttctgtcaccccccacccacaacacacacatacaaaccacacacacacacagcagctaactaagaacagcgccctaattttgtcaattttatggaatttttcttaaggaatcccatcaccatcttatacctactacagtaatgtattagtcacttaccatgggccatgcattgccctaagttactttacatggacaatatcacttcatttcccctacaaccctatgagctcaatactatggttattccccttttgcttcaaattcacttgatcactaatatgaaagaatcttaaaaagtatttttaaaacatctatcttatacgttttattattacaatggactgaatataagtgcccctccaatatttatatcttgaaatcctaacccccaatgtgacggtattaggaggtggggcttttggggaaaaattaggttatgagggtggagccctcatgaatggcattagtgtccttataaaagggactgcagagagttctctttccaccatgtgaggatacaacaaaaagttggcagtgtataactcaggagaggaacctgcacaaccaggcgggtactctgatattgaacctacagactccagaaatgtcagaaataagttcctgttgtttataagccacccagtttatactattttgttatagcagcccaaactaagatcattacaattgcaaaacatttatgaaatagcttactgagttgtgttttgtaaattttgttcaagcaaagcactaaaatatagtttttaacctccaaaaagtgacttttttttataccagagaagaaacagaatttagattaaagggtccactatgtctttttaaaaaatcatataggtgcttcctatctctgatttaagtttatgtacttattataaataagaatagtggaagctcctgtttatatctgtttaagatttgcagccaatatctacaaagtaccaaattgacaacactgataagatgatgggggccaatcatcttgttgaaatgaagagaaagagatggctaaagatttttcatagaaattactccacccacatacaacatctaaaaaagttacatttatgcacatttaattggcaaatagaaaaatttatatataaatatccctatttttgaataaatctgaaggttaatgaagcaatgaagaatgcctgtgcttaatacagagacattcaccaggaaaagaagtgtccctagttgaaaagatattagatccctattctaaaatctcaattgcttcatgcagaaaaactcctaaaatagaacatttatggcatactttttgtattatgtttggctgtgttttattttttgaataaatacttatagaggcatatacctgggcttcattttcttttgaacaatttttgagattgtgtgagataatgtttcctacttcatggagaaactaggtgataaaaaggaattttacagagggccttactgctatatctacttcatccccaagcagcattactaccctaaatatgcctgttactatggatggaaataatctatattctctttgaagccaaatcttccacttggacattagatactatcactgttttctgactcaacaaaattgcttaaggaattcttgctatctttcctaaaacatgaatctctctctctctactggaccatttccatcagcacataaccatattgtaatttctcctaatcaaaaacagcagcaataacaaaccccttaggttgacctcactttccccaggtgttttcatccaatttctttacttccctttgcaggaacctcaagagttggatttcctcactgtttcaagttcctctcctaccattccccattaagctacttaaaccaggctttaactgtcacaactctaccaaattatgttcttgttcaggtcaccagtgttgctcagttggaaaattcaatgagtgactttcagtattcatcatactggatctatcagcaatatttgtcactacttttgactcccctctacttgatgcacttcattctcttggtttttaggacaccacaacctcctagtttttcttctgccttgatagtcacacctcagtctccacttataattctgaggacccccagagctgagtcccagtcttctctactttatttatacacactcacttgataatatcactcagcctcacagtttgtaatcccaacatgttggtgactcctaggtctccatctttggctgggggaagttgacattctggttagctccaaatatgcatgatcaacaaccaacttgacatctataatttggtgtctaatagtcatttcaataccagtatgtccaaaacctaaaacccaatattcctcacaaactggctcttcctatagccatctcagtcaatagcatctcaatccatatctcaacccatagctatatttctagttgctcaagccaaaactttgctttcttttcaactcacactccatatccaatctatctcaaaatcctattgaattttgatttcaatatatatccatatgcagactacttctcataacctctactgaccaacctatggcctgagccacatcatctttttcttgggttactggcacggccccctaattagtctgtttgcttctatccttgccctgctcatctagtctctacataatatcctgaaagacccttgttaaaaagtcaactcttcctcagcaccttgaagtaacacccatttcactcagattaatgccaaagtcttctatcagtaacctgcaaagcctcatggggcctcacccttgcctctctgttatctctctgacctataatgcattcccttccatctctttgaatcagccatgctggcttctttgctgttcattaaatgcgccaggcagtctcctgccactgggcctttgcacaggctgttctctctgccagtgatactcttccctggatatatacttacagtctcacctgcctcagatatttgctcaattgacactcctatttaaaattgcaactgtgcacatggtcctcctctgccagtgccccaccccagtcttaaacctaatcactctgctttattttcatcttttccatagcatttactatgaagaatataatatattggctgatgtactgtttactgtctgtctccctgtgctagaatgtagattctgcaagggtagggattggtgtctgtcttggtcatgtctttttttaagtccctagaatagtgcttagcataggaagtcacacaatgggtgttgaactgaattgaataaaatgagcttccaggaaaagaaccagaattgataacattgtacctatatgaaataagaacttgacttaaaagaacttgatagagaattactgtctactgactgattaaatcacaaagcaagagggtagaatacctgaatacacggcctgtttgttggaaaagagatgacaacctggaatgaccacctgaaagaaaatgaaaacatatctcctctccctttttttaaaagattctggcaatatattttcagatgactccagaaggagcttggaacagaccacaataatatgtcctacaaagtcatgaaggagctgagcttaaaacttaacctaaaaaaaaaatctgtttctctatatctagggttcattgtagttctatacagacactctgacccatagatgtctgcctgtggcttgtgctattgatggcttatctacgtcctatttcattaaatcagtctcagaaaagagcagcagtcccacggaatgtttattttcaccaggcttggcaatcttaaggaaaatcaagtagcacagtgttctcaaggtatagtccccgtcctgtggcattagcaccacctagaaacttgtgataattgcaagttcttgggatccaccccacccccaaattagaatttacaaaatcagaagaaattttaagggtagtacccagccatctgtgatttaacaagtcctccagatgactctgatgcccattcaggtttgagagccattgaggaagcagaattgttcatttacaagtttacaatgactttcttagcaaggcaatcttagaatacagacttcctccactgattaatgcaataaatttgctctgttatccaacacccaacaatgactcaacagacttctcttttgcactaacctttgcgaaatactctttctgggcattctgcctcagattaatgagaaagtggtagactgctcacatattccagaagcctgaattaactgatttcataatgctctgagctgcttggctccaggttcttcctgttaagatttatgaacccagactgtaacaccatttctcaacatatcttcaagttgatgatttcatttcaatagtaaagttgaccataatggaaagtgaattaaaggaaatcaaacaaacagatatcgagggttgtgtgaatttgtcaaaaatgacttactaattaaaaatattaattcacaagtaggtcaccaagagcccctttgctttgattattcatgtaaagcccgttagtctgtaaattattcacttaaaaactagaactccatctagtctatgaagtctaaaacaaatattccttaaggtcaaatttcctaggactctcacattcccattaaaggtagacagagatcccatttaaccgatgacaaaacagaagctcagagtcttagctaaggccacatcattatggacaaagtcacaaggctcagatttcttgaattttcttatagatgtcaattcaattgtaattaataatgtattaagtacctgctctgtgccagaccctggattaggggatggggctacataagtttcttttcttttcttttttctttttttttttttttgagacagagtcttgctctgtcacccaggctggaaggcagtggtgcaatctcagctcactgcaactccgcctcccaggttcaagcgattcccccgcctcagcctcctaagtagctgggattacaggcatgcaccaccatgctgggctttttttttttttttttagtagaaacagggtttcaccatgttggttgggctggtcttgaactcctgacctcaagcaatccacccaccttggcttctcaaagtgctgggattacaggcgtgagtcacggcgctcggcataaatttctgacatagtccctgcctttaaggagttcaatgcaagagaccctgtctccctgattatttaatatctttctttggctgacttcgaactccagtgaagtaatgaaaggaatagtaatgattgttgatttttacattgaagaaatcttgtgacagaaagaatttcaccaggaggagaatcaaggtcctcacactgaccacgcactatttaatcaaggcaccaagatgtcctatatcttggtgttgaagagattaaaagtgccctattgtgggctattaatatttcataccataacacaatgtagagataccatgtgaaaaaatgatgagcttgtagaaaaggcagtgagaattggagctcaagctcagagaagaataaaagctaagtatgaacaagtcacattttacaatttaaaaataacatgatgttcagatatattcccaaaacaaagacatagtagaactggtctgcactcttgttattctcttcattatatgagtacaaggttgagtttgggaggtctacatttttcaaaacactagcaccaccactttagcaaatgttcaggttaaggcaataaacttgtgtggctgggaactggagaccaagttctggtctccactgtaaaacttactgactttataaccaaaggtaaggttattttgggtggtggaaaaggtgaaaataagacaactgcagacaggactttttaaggaaattgaagttttccataaagcattaaaagctatagaaatataaggtcatatttattcagtcaccattttaagcacctataatatactctgagtagcaccaagtcctggggatacccaagtgcatatactgtcatcacgtggcatccatgaagaattggttccaggatcccctgccaataccaaaatctgcagatgctcaagtcctttatataaaatgtctagtatttgcatgtaacctatgcacatcctcctgtatactttaaatcatctctagattacatatgatatctaataaaatgtaaatactatgtgaataattgttatattttattgtttagggaattacaagaaaataatctgtaggtgtgcagtacagacacaacaatcctttttttttccaaatgtttttgatccagagttaattgaatccccagatgtgaaatccatggatgtgaaggaccaatggtaacaaaccattggtgttttttattcattactagaatagctgggaaacatccttagaacatcagtccaaagtgacttgaagtgtaaaaaaattggatataagagagcttttaaagagagttaagtttccttcattagaaaaaaaaaaactagggaaggtaggcctaataactttaaaaaattcatggcgtcattttaagaagagcttaggtcagccagtatgaaaacaaagaaaaagaaaagttagcctcaagtcatagaggaaaaaaaaaaaaaaagatttggaaagagattagggagactgatttttctggaacactagagctagttattgggggaaaaaaaaccccgtggaattgctctgctggaagcatttggaaagtaattagctaattctctttctcaatgtgtttaaagataagactaaaagtgggtgctagaatactccttttcttgaagctccgcttctagaactctgaatggcaatgaggtggattaaaagtctattctcttctccctcccttatttggctggcatgtctaattccagaattggaaactcatagacattgctatgaaatgtatcatagatcatgactcactatgaaaaggacaagtgtgcaagttgccttaccagtgaaaaatcctctgcctgccctctttcttcctgagacaagacttcagttctttctctctgattcatatcctgaggaaatcaacatgataaaaaatggctgcgttcaattaaaaaatgtctccaacccacactttaaaaacataagctcttttcaatccagatatggattatcttcctgagaaagtcttttccttcagaagaattttgtgccatttaagataggcaaaacaggcagaatgccattcctgcaatgaaagttacgcatttagccaacagatttgcaaagtgcatctgccatggcaatggatttaaagatgggaattagtaggagaaagaactatggtttatttgagcccaccagcatcaggtattctaggtactcttcaacagcagcagttaacattaattgaatgcttgctaggtatcaggtaccattctaagttttccttgcattatttcatttaatccaaacaagttcatgacataaatcctattatggatcctaactcacagatgaggaaaatgaggctcatcagaggttaaccaattttttcaatatgaggtagcaagtagcagagagggctttcaaatcagaactgtctgacatcagaacttaaacttctaactattcctcatacagtcttttaggaaaaggtagatacaagatctccattgtggatatgagaaaatggaaactcagagaagaagagtagcttgattaagagcacaaagattactgatgtttttggcctaggatttgagctcaggtcaggaggactccaatgttcacgttccagtcatatcgatagaaaacctaggagatgagtagatgtcctgacattcattccacgtagattatttttaattcaaataagcaaatgcccactatgtataaaactctgtacaagtcttactgcatgtaagactttgaagatagtatgaaaaaattaaatatattgtacctgcctccaatgaactttaaattctagttgacagagaaaacacacagatgaataaactaagatcagttgcaaagtattgtgacaccataggtaaaataatatcctacgcattaaatagattcagaagaaatgctgggagaagcagtgattagagaagaaaattgatcaagaaaagcttccttggagaggtataaaatgatatgtatgatgaatagagttgatcccattgcctgactccctgtctatttttgtgggtagaaaaaaaaagatactttggagaacctatatggagagaaaatatgatcttagcacctatgggaaacgtcctatgaaagatacggctcacaattacagagccatggaaaggttgaaggacagggaaggatttctctgtgattacagttaaaactactagtgattactctttctcttggctagtagttttccatagggtcccatcaaatataaactataatagttacagatcaaatctacactcattctttatgaaaaaaaggcaaacagccagaagagagggagaggaaaagttcatttcagcattttcaagggattttccatgagatctagccagtaatagaagagaaaaaaattttttctgaataaggaatgggctcgaatgctgattgcttatttcacctcccacctccccggcaaacccccaatttaataaataattggctattaaaaagaacctttggatggtaagcatgtattcctcagttataagatttatccaagctacgttcaactttttttcagtctaaagcatggacttcagccttcaagaggactatttactgagacttctgtaagaacattatcttcttataaactagaagcaagaagtattcaaggtgttaatgagtattactaaataaaacagttctaaagtcaaatcactgggaaagcaaatgttttactttattgtattatttttattttacagccttaactatgctgatgtacattttgaatgtccagtggggacatattcaggatttcttaaacttgtttgaccttagaatacctccttattttgtagaatttgtattgatatctcatagacttcatattccaagaaaagagtcatgctctctttccttacataagttttagaaaggtagctcttagaacagttaggtccaggtggatgcagtaatggatggagaaagaggactaccaactggccataacttcaagcccatagctgggagtgatgggcctccactttcagcttccttgaattcatcattaagcaagagtgagtgacaaatctctaatgtttcttttgatgcttttcagggccacgttcacagccacatggaaaagcactggcgtcactctcctctataatgatcagctcagtgttggtatcagtgggaacgagggagacaaagcaggggtttcttcccacaagatggccaagggctgtctagaactgatggagcacgtggagtgaaggatcatttacactgcatgcctgaacacactgtgtcaattacattttagtatttcacccatagtctttgaaaagcactcaaaagagttcagattcttttagtgggtcgttctgtatctgttagatgttccttgcccttgcctacatctgaccagagtataagactaatgaaatcaaacttctctaaaggccacttgtatgagtgtgactttaaaatgctgccattgcttatggtcatttaaagaggaggaaatggagacagtgaagagaaagttgcaccacttagagttctattttgagacagaaatcctcaagtaaaacttctgtctacaggaatgcagttttcttaggagagagtttacttctaaattagcacacctgaactacttaattcctaacacatcacacgtaccgctgaatcagacagcctaccctgaagggctgtttttctgccctatcctaagagtcagaaatgtgtaaaaagacacagtcaactcattaacacatttgcatttttcaatagcattaaccaagatttttataaaaagtatatgtataaatatgtaaaattaacatatttttaatgtaaatattgtatcattgcatgtaagtatacttatgcttctttttatatcatccaaatatctttatcaatgaagaattctctattttacaggtaaacagttttaatgaacaaactaatgtttgtgtagtgctttacagtttacaagtcttattttatcttcaatacaactctgagagttgaatcttagtgtcttcatttcatgatgtagaaattaaagattgagaaaatatcaccaggctagtaattggcagagtgagactgaaacccagacttttttttatctcagatttagcactgtcatttctcaaggagtgagtcagaacccacattttctgagagatttccagaataagtgcatggtgatccgttctatactcgtagttcattgtactgcaaaattagtacttgattggaaactgtcttattgtccaactacttcatgtgtctctgtcttatctatcacacccaaacataagccttttattatgttgctctttggggcatcccctgacttcctcatgtgctgttcttactgcagagaatgctctctcctttcagaccccacacaacaaggctcaatcatattcaacaggactcaggctaggggtggtgcctttcccttcttggaaactcttgctggcattctcaaccgtcatccttgctccaggaaggagactctcctatatgctcctatagcatccagagctgacatctgtaatggattcatcccactgtcttgcactgccagtgtctatttatcatgcatttcccacatgaccttcaccaccttgagaacaggaatcttatgttacttctctttgaatcctcagaacctaccacatagtaggctattaataactgataaataaataattgaataaataaagtaacataaaaccaattaaggcagttagttaatgtctttgaggagttctcaggctcatgggaagaagaatctgtaaagagaacaggacaagcaacacagcaaggtgtacttccccagtacacagatggattcaggtgccttgggggcatacataagaagggacagtgctgccctgccagtcaggcctcagagaaagcaaagttgaacagagtcttgaaaggagagtagaaagtcaccagtgtttgtggagctgagagaagtagggtcggagtaggcagcatgaagagaaggcaggctttagcaaggctctattttatcttggctgtgtaacaaccctttctctgggggagctgaccttcactgcatccaaccttagggttctatagcagctgccagtcatgtttcttgtttccctggctcagaggacttcccagaggttttgcacatttttccagcctcatggaggaaggtctaagagaataaagctgacccagagagagaagcttagggcaaagtgggaggaagtgcctggatccctgattctagtaatttctggagcctggtgtacccagccctttccagagtttggtttgttacctaactaaattaagctgggtttctttcacttgcaaacacaagagtactgaccaaaagtaaaaccttaaaagtggccgggcgcagtgactcacacctgtaatcccagcactttgagaggctgaggcagatggatcacttgaggtcaggagttcaagaccagcctggccaacatgatgaaaccctgtctctactaaaactacaaaaattagctgggtgtagcagcgtgtacctgtagccccagctactcaggagcctgaggcacaagaatcacttaaacccagatggcagaggttgcagtgagctgagatcatgccactgtactccagcctcagcaacagagcaagactcagtcaaaaaaacaaaacaaacaaaaaaaccccaccttaataatatctcctgtgggctgggcatggtgacacacgcctgtaatcccagcactttggaaggccgaagcaggaggatcacttgagcccaggagttcaagaccagcctaggcaacatagtgagaccctatctctacacaaaataaaacaattagctgtgtgtgatggcatacacctgtagtcccagttactcaggaggctgagctgggaggatcacttgagcccaggagtttgaggctgcagtgagctatgatcgcaccactgtactccagcctgggtgacagagtgagaccttgtctctaaataagattaacaacaacgaatctcccctatagcatgcacatagagatagtcacaaagtagctactcaagagtttgttcctcaaatggatcttttcccatatctgttcaatcctttcatttaaagatggagacacagacttaagtaccttttccaaagccactcattctactcataacagattttatcctagtgcctgacttttcttcccagaacagagctccatccaccaaatactgcttcctttgctttttgctggctaattagccttaaggtaagaggtgatcatgggattcatatttgatgaaaaaaaatcaaaatgaacaaagaattcatgaaatgactataaagtgatgaaattatggttttttattcatttaacaaatagcccccacatacatctgtctctgtggtaggcgggtattctgggataaacaagacatgctccttgacctcaagtaagttcactaagtggagggaggaactgtacaacttaccagagcttcatatatcttcaaatcagcaatctgggagaatatatacttattattttttcatttgctggtaagtccctttgaaccagttatgagtcaaacaaaaatgtcagcttatgattttataagtgcatttaaattcttttttaaaatttttttttagatggagtcttgctctgttgcccaggctggagtgcagtggcatgatctcgactcactgcaacctctgcctcctgagttcaagcaatcctcctgcctcagctgcccaagtagctgggactacaggcgtgtgccaccatgcccagctaatttttgtatctttagtagagatggggtttcaccatattggccaggctggtctcgaactcctgatctgcctgccttggcctcccaaagtgctgggattacaggtgtgagccaccgcgcccggccttaaattcatttttaatcaaaaatggtatcatgcagctggaccaattgaatatggcacttgggtttttttgaaaacacaaaatagcctcaaaagacaatgaatttcttccactaagtatattgaaagaatatgctgtagattcttaggtctgctataaaacaggaggttcaaagatgttttgcccgaggctaggcagcatcactgccctgaaagtaactatactattcaagatgagtatgtttgtatgcatttgttaaaataatgagttctagaatttatattaaatttccagacaggcctagaggcagatgccaggatcgccttaagtcaccttgatgcccttccagctctgtgattctacgattgcttatactggatttctccaaccctgtgatgggctgaagagctatttctgtcctagttctttgccttatataggtcaaatcccattccaatgagtaccataacaataaccacctcatggcctggttattttagacaacctgataaaataagaatcaagtatgacctccaaaccgaagttggctgttacagaatttgacctgaatattacttaagcaaggaggtggccagtgtcttaggttttcatcttcatggcactgaaccattgcaaaacagttagattgaaggtaccaagaatctattagtgaaaccaaacaactgtacccagagtcccttagtcagtgactccatgtgcctgatagatactacaaaatcagaatgtcaggggactgaatgctatgaatttccatgtaagaatggtctccaacttatgtgtatccactatagccaaagagtgtcagggcaattgtccatcttaattcagggctattaataagccttattttcatattgggcatcccaaacctaaggtttcttctccagtctctcccaggaagctagattcatgcttctttttgcatatattgttcctgcttgaaacaggtgttagttattgctctctgaaacgtacctttacaagagtgtaaagaccccgagggtacatatgtttttggttgattcccagctatgcttaatatctgggtcctctcattagaatttaagttccacaaaagcgtaaaatctcatgcctagaacagtgcctagcgcatagtaagtgcttgataattatttgttgaaataatgaatgaataatgatggatagttattctttaagacccaattccaatgccacctgtcccctcccaaagcagctatgtgtctctcctctgatcctttagtactgtttgcatttctctataataatacttacaggatactctcttaattgtttatatctgttttcccaattaagctggggaatattttatggccggaactatgttttataatgccatatgctttgtgcctaaaacaatagaagttcaataaatgcttattgcttgaacggctgaaagaatgaataaaaatatttctcttgtcatgataaatgctaaagatttgtgatctaaccttatacctcaaattttgcctggactcaagagctttccatggatcaaactgatgaagccatgagtcactgggcttggagggaggggtgtttgtttgtagaggatttgcttcccgacctcgatgaatcacatgtataatcacccaaactgcatcctgtctggggaagtaaccaaaacccctatttctggccccaatggctttttggttttatgagtaaatgccacttgcatgtcattaaataaatgccctcagaaagtcctcagccagtgctataacctacaatagtcagggttgtgacagagaagcagtcttgaaattagagcgcaaggcggaggaggtacctttttcacctggcgtctttctggtgacctgcctcaaagttcttttccaatatcggtcacactctactcccagtcacaggtgtgatcatgtaattctcctgcacacaaagaatcaatggctctcactatctacagaataaagaccaaacttcttaacttacaatccaaggccctccagaatctggttccatcctgttttacctccctcatcttcttctattcccatataaccatacgttccacaaacaccgaacaattttcggaacacatccaaatcctgctctttgctcttatgcttttgttccctcctagaatgccacccctcccattttcagatgcccaacacttgtgtattcttcaagtctcacaaaatgccacttcctccataatgtcctccgtgattgtctaaggaagaatgacttctccattgagcatacctaagattttatctgtactcccatcccattgcttatttctaataacacataggcacatgtttgtttctctaatcaattttcttagtcaatgtgatactccaactcttaccagtgcctgccgcaatggacactcaaaataaaagttggttgaataaaaaaattgaattagttcaattgtttaaatccttatctttgtcttggaatcttcaggaaaggttcgatgtaaaaatttcttattcttatttatctcattttatccctcacccctttccaagaaaacatgagattaagaaaagctttggtcccagcaaacaactgttgttttatatctatgaatctcaaaggcaaggttttcattccaggcttccttcctcttcatatctagcactttggggcccactttgctaatagatgtcctaagctcgaggggaaaatataattttgatattaacttgaacaaaaaagaaacataacaaagagaggatttactgtttcaaaatgcaaacttttaaaaagatagtgtattccaaaaacaaagacttttctgttatctgctgttttggaatattcatgccacagtgccaatttcagcgtggatgcattcctttcagtatggataagtgaaagttcatgcagtaaagtttagctttgactgcaaaccactttgctttcctttctgtttattagtataactctggttatgagaataaggacatagaagcagacaaggctaaaatcaccccagccaagttcagataatgagagaaaagaatgtcaagagttttattttctctactgtctttgggcaatggtcatatctaggtggataaaagagacagacagccattattgcagtttgagagccatctcctttcctgcttcttgaaagccgccactggggcagcattcttccttcgttagaggtcaagtcctccctataccactttatggctgagtgactatagaaaagtcagcaactggtcatcggagaaatgcaaatcaaaaccgcaatgagataccatctcacaccagttagaatggcgatcattaaaaagtcaggaaacaacaggtgctggagaggatgtggagaaataagaacgcttttacactgttggtgggactgtaaactagttcaaccattgtggaagaccatgtggcgattcctcaaggatctagaactagaaataccatttgacccagtgatcccattactgggtatatacccaaaggattataaatcatgctactataaagacacatgcacacgtatgtttattgtggcactattcacaatagcaaagacttggaaccaacccaatgtccaacaatgatagactggattaagaaaatgtggcacatatacaacatggactactatgcagccacaaaaaaggatgagttcatgtcctttgtagtgacatggttgaagctggaaaccatcattctgagcaaactatcacaaggatagaaaaccaaacaccgcatgttctcactcataggtgggaattgaacaatgagaacacttggacacagggtggggaacatcacacaccggggcctgtcatggggtgggggcagtggggacagatagcattaggaggaatacctaatgtgaatgacgagttaatgggtgcagcacaccaacatgacacatgtatacatatgtaacaaacctgcacgttgtgcacttgtaccctagaacttaaagtataatttaaaagaagaagaaaagtcggcaatttcttcatcagttaagtgaagataataatacctattacaacataacatggtcagactttgtaaactctaaagtgctgttcaaagattagctactgttataaattcaaagatgaattgttttttttttttcattacctaacacaggggttggcagacgctttttgtaagagaatgataataacattttaagattcgtggaccatgtggtgtctgttgtaacaactccattctgcctctgtattaggaaagcagccaaagacaatatctaaatgaatggatgggctttgttccaacaaaactttatttataacaggtagtggaccagatttggcccatgggacacatttgcaaatctctgccctactcctttggtgagaacgaaacactagaggcagaggggaatatctaaactctgtttgtggcatgaagagtaatatagttgggttttgtgaacagttgccttgaggctttcaaatatctttttaaggtactctctttaacattagagttttaattttgtacattatcaccaccatcttcatcatcatcaatatcattctgtacctatctgagaagtattaccaagagaggtataaaagaaccctagttttctatacctatcacttgaccatactctgttctgggaaagacagctctgattattgttaaagaaaatatcaatcatacttgtggtgaaaggtcgctacattttttaacaaattggtcctttgagcaagatgaattttaatggattggtttattaacctaaaggttgaaccagactgagagtaactgaatgatttgctcataattagtattatttataattattttacttgggaaaaaatatcaccttaaatgtcaggatgttttttaattgcttcagatgagattcaaaataattgacttcgcaaatttatttttaaaaactcatttaaaaacatctgaagctgttgacagtctgtctagaagaggcaagatattgatattcattactaggaacagggcagaaattgatccatcatttttttaaccacatgaattgtgcattgtggtcacttctggactctgaaatagctgcaatgctgatagagtgatgcgtttgttcctctcccccattaaatctgctatctaagcgaagatgctgtgtgtgtggatgtaggtattatgtttcttgctcaaatacatatttacatatatttttattaaaaggggaataggcacatgggcgaaaaaaggatgtatatatgtatttagtatttttagaaaaatacaaatagtctatgtacacattgcgcatccattcatgtgacttacataggatactaactttttgatggtgagtaggtatatgacaaatttagcatctttataaatatttgatttatcagttgattggtggaaatgaaaaaaagtaagggactatattaacagctggggaaagacagcttttcaaataattttaattgtgcaatacgggtaaatcactagtaagaaacatgcagcagaataatgactataaaaccttataattatacagcacttggatagtcaggaactgttggtgtgtgcagtataatcacatgtgctccttacatctatatttggatgcacgaaggaaggatggtaacagtttcatttgacagatgagcaagagaagtcaagtgattttcccaccatctacattgccttccccatacaccacatggcctctggaacccgagcgaagggtgagtgcatctataggcatcaaagccaacttcagtcttcgcaggcagaatcaaccagccagatccagtgtgcagaacccaattttcatccaagacatttcaaggaactaagtaacaaatgacccagaccaaaaacaaacaaacaaacaaaaaaaaaagcaaacacatttcaggcagtgaatatagtgatgggatgattaactgattaacagagtctcttatttgcttcttccaagcatatttagtctgatcatgtgcctgagacatggtgtgacatttgctctggcagcagtgtccaggacacagacaaatcactcatcagtcaggtagccaggcagacaccatcaatcattatctgcatgtttgagaaatacaaaactgtagctgaggtcggggaaaagaacatttgatggtggctaaaaggtaagtatacaaagattcctatttatctcccaaagaggttactctaacatgtgctgtggaaatagagtcataaattctaaattttctcacagataggaggttaaggctaatatatctatataacgtatatgttatatattatctgattcttcatatatatatatatatatatatatatatatatatatatatatatctccacagctcagtaggcaaacccgctgttgaggataggaagaatatattaactgattaattattattaatgccatcttttatttaactagcaattgtaatctattaagagcattcattcacactatctgacttattcaaccctcagaaaaaccctgtagggctcataagtaatatattattatcttccttttatagacaaaggaaaaggaaactcagatatttcctttcttaagctaatctcaccagcaagtggcaaagcctggactagaacacggaatttctgactcctattccattacctagagcgactgtggaagagccgaaggaagaaagggaaagtgtgaaacatgagttccgagcagagaggacctgaaaacacactcagaccagaattccttctagtttgggttaaagtccggagtgggtgtggctatacgacacacaaccagaatgattagattgactttctggcacacctactcactttgaattttcttgtgcaactgagccttttgtgtcaatctcccatcctctcctgccttgtgaagtttctggggtggccgagttggaaccaacttcaaaccctcttatgtctctgattcactttccaaaccctccctctcccactccgtggtcagccttttgtatcacaccctgcaaacatttttttcttttgcgctcctttgggactcctccctcttctctccctccatctcccaactcctctgcactgcctttcccctttaatctctgctgaccaccttttgtgaatgctccatccgctcctccccccgtcacgactgtcctcttgcgggtacctacctgtgtgctctgcagccacacgcacctcctggttgcccctcagatgtcttggttctgtctgtctgatgtcgccagcctccacccggggcctgtgagctgtgcatgtcttcaagctctttgttactattcctccttaatttataatgctaggcaaataacaacacacaataaaagatgatatcagctgtgtttctcgcctgcagcctccagaagtgttatcttagaccccatcattgcaacaaagaaatctctcagttgagtgagtgaaaaccagttacaggacaggaggagaaaacttctgcgcttccaaaattccgcagccccagctgccctccggcggctcccccttgtgggagatgtggggcatagcaaggcagtgcccagttgggacggtgcctgggtgggaggagggcgagagaagagtgctcgcactcagggatgtgccccagagggcgtggggtccggttccggccacgaagaacagcctctgtgtgagttgcaggactgaggtcctctgcaatttctcagggaaatacttccgggagacgcagtcctcagtgcctggaggtctctgggtccaggtgagtgtggtgtgagtaataagcctgcatggcttacgcgctgcatgggaagtcctgtatcacaatcacaacgtatcataaagtcggaggttcacacagggctgttccgagaggtaaggcgtggtctccagtctctgagtaaaagacttgatggtccagtctcctggattctcttgccaccgtggacacttggcctttcggtccctctagagctctggacacatactgctccccaccttagtgaaaacagactgtatgtccaaatagtatctttctccagaggaacacggtctcatttatactaacccaccctggcagatatcactgtcatcctcctcctcctcctcctcatttgagtgtcatacagcttcttttgcttacggttattattgttttgttttttaatctttattactgtagtgtctatgttgcttatggagaaacagctcatgaagtagctgtggtttttaacaaatggagctttattattttattccaagttcaatcttcacgtatggttcagtatagagctgccaccaacatcagaaaggtagtggagtttaatagagtccagtggaaattggtctgagatttgttttgctgaaattaaggactcccttgccaggactgctggaagagtcaatgagacaatatgacgtggcaaaacaagctctaggcttcaacagatctagactcgatacctatctctgctacttattttatgctcaattaactactctcacctcagtttctttgtccataaaatggagttaacttagtttcacaagcaagatctcacaactggtatgatggcagaatgaaataatacgtcacaaaccacatgctcacctacagttcagtggcagagcacggttgtcattctggaaagtttctttgtttggattccagtaactgtgctgataaatagagagcatcccactaggcctattggttgtttcctccacgtttgacatcatgaccagttttctcctgcagactcggtctgggtctctctgtctgtgtcacacccagcatactgttctcacagagggggagccaatcaatactccttaatggtgtggctcaatgccctgtactgaggatgatcagtgagtgtcactcccacttttctccagagacaggacatagtctagacatacggtgcaggaggaggtcaggaaccctgggttctgatcttagctccacttactagtgcattggaaatgatacttgaagttgcacgagtctctgattctgctgcagctactttatgagctctttctccataactaacattggtattacaggaataaagacaaaagacagcaataactttaagcaaaagaagttgtgtgccacttaaatgatgacgatgatgatgaggaggaggatgacaaagcagaagaaagtatgtcaatgatgatattgctatgaaccataaactcactaaatatttctcagacctatgttgggcctagggctgaatatgaaagggttaaactgccctgaagataattaagccctgttacaaactcaagttaaaaaaaaacaaacaaaaacaaaaaacaaaacaaaacaaaaaaacagccataaggatttagagaaatcaagaaaagcagcaaaaacattccctttcacgcaaacagatctaaaactgagaacctttagtgacaagcccgctgtgaaagatgggatcaaaatccagaattacttctacaggagtaagtatcagagggtctggagcatacgtgtccccatcagggacacggggtcatgagtggagaaacaggaaaatgagtggtgagggaaggagagtcttgttcccctttggattggcagagcattccattctgctctgcacccgacaccaggaaaaatgcaggacccagacaataggacaacaaagatgaagcaaccgtgtcatgaggaacttgaagaactggaaatatttaggcagataaagatgcaactctgtaattgctgtctttgaatatttaaaggactcttaattagaaaagggtgggatttgctccacccagcttcaggaaatagaatgaaactaatggagagacacgtcaaagagaaatatttccgatccactataagaaaaatattctggtagtttagtccagatttggaaaggtcactttgtgtctggagaaggctgtgagggctctgtcattggacattctttggccaaatgcagggccagccatggaggctgcctgcactgagacaacctttggggatccttctagctcttggactatttgagtctatgaacgatctgggatccaaaaggagaaactagacaaaagaagcatgtgacatcctcacacagagcattttaactcctgctgagggatctcctggtctaacacattagatgatcagataaatccaaagtgtgcttgcaaccttttcctctctttcccttgaacagcactatttctttaactatcacaggtaagtccaagagttaggtatctcccaggtggggcaaatggcctttagtatagtggaaaacacacaagaaaaggcaaaactcttacactgaatgatcagtttaaggagaatcgcaggttttaaaagagatgatgtttagaagccatcttatcaaatatctcccccaatgtctgaattccacccatatcttccctgatcgagtggttgtctgatctctgtttgaactcagcctctgaagtcaatttgattggaggccattctgattgggctcaagaataagcaaaacacacacatagaaaatgcaatcagcaagacatggatgcaagggaaaaggcacctttggtatagtaccagaatacaaggcagaacctaaagctaattagaatttcttgaagtcagaattacagtaaattttaaaagccctacctacagtttgaggagacatacttgggacacacagtaccagtaaaaattgtaggtgacgttgttgccttttctgcaatcttttgcgtctatgtgtgagccttacatggcaggctgggaaggcataagaataggggtaggggcggttgaaagggtgcaggttgctaaaaaggaaggaactacggggctttgggcggggctggtatgtggtatgcgtttggagttgctttcatgatattatcctggacagagttgcaaaaaagggtgcaaagccgatgagggtgtcagataagagaaatggagcattcgagaattgacttctgattgagcagagggaacactgagctcagacaaaggagacaaaaagagtttagggatgaaggaaaagggagaaacatttagaggtaggaagatgtgaagggagaaactgcataggaggtctaagatatctgggacatttccaagaccatcacggggtctcaaggggcgatgagaggcaggaaaaagggtaaatgctgaggaggaagaaggaggccgggcactgaaagatcttctgagtagaaagaaacaggaagaaagctagacccatcataagacttggtgtctccatttcccgactaggtcacttctcaggagagagaatcaaagggcaccttcctggctgcaaaagatggttaattcacgagaaaaatctgaatccatcaagtgttgactagacacctcctatatgctcaagatacaggatagaagtagaaatcaagttccacagtaacctgagttactactagtcagttaacaatcatttgctcagtaactactcttggccaaagaccatggtaagcatgaggaacccgactaggatgactaggccaaccctcccaggggtcacagagtaacaggtgaaagggagaagcacagcccagtgtaaaactcctgcaaaggattatagggtgctgtgaaggaaaataacagaatatccaaataatcatttctaggttttatgtttttaacagaaaagacatgtcagacgccacaaagaatcaggagcagtcagtctgtaggaatcgtcctggcctgggaatgtcagaaagaacattcctagtccccagtgcccagataagggcagtggaggctgaactcagaagaggaccactgagcaactggccacactgggggctgtactcctcagggcaatgaggaggatgagaatggaaggaggaggcctcccattctacatccttctccggcagaccccactcaccctgccaggtgacagttcagtggatgtgacttccacccgtggctaagcaaggaaacagcctctttggaacttctccaatgtcgcagctctcctgtccccactgctgttccactcaagctcgcagatgagcccagctcctctcctccattctaaacgcctctgtttcagggaagcgtttgcattttccttggcacaggtacagcttgctgaattcttttaggccaggccaattacaacaagccctaaaattgctgagccaagtggtttcttcagagatctgcttacattccctccctgaaaagagcagggggcccacttcgtgctgtctctgcacacaaaaagtgcacgtttcgcttttaaggtggagtaggcataggacagttttcccagagagagggtgagatgcaacctattttcactctgtttttacttcgcctaattgggcttcatcccatttcagaggacggacaagatggctcagggccggctcccttgaagaccgtcttgagaaagggctagagaggcttttagtgcaagccccacgggatcacaagttgaaagaagtatttacatgtgtcagtaccctctcattcctgaacttcaactaggttcagggttcagtattgcaatcacattctcgtaagttctggctttgggaggaagatggagtcagtaatgcataactttgatttttttaagtaatcatgatatttgggtagaaataactcaattccaaagaattatttagattagtctaaagttgtttttttttcctgattttgaaattgttacaccatgacttttcaacaaactcacctctttgtttattttctattatgcttacatcagaatacataacattccctagctatttctagcttagaggaagacattgagagattatcttaatgagaacaggtcaagcggtggcatagccagtttggaatttaaaattatccatgaataataaagcacctaatctggtgcagatcattgagaactgaccaattctgagaggtacttgccagaaaaccaaatagtgtccttcccacaataaaaatgtatcacagaaagaagtgtgtccttgattcttggcattaactcatggctagtaaggccacggcattgcagatctgtgctctgagtctgaaggcattcttcagatggggaaacaggatctcttgaaaagggaaatttgaactcattctcacagatgagatgacctacatgtgtccagagatatgagagcactcatttagagcagaactttcttactcagacagaaactaaagggtcacaaggtaaaaaactgccatttttaacttaaaaggcaaaaaatcagggcaaatctcatttgcagatggataaataaattctaggaacgtaatctggttctaacatccttatcaaaaagcctggcatgatggacaagagggtctctggtggtcaatctcctgggagggggctctaccaagagcccccagtgccactcaacccagagactttcagcccccactgggtacttggcaatcagaagtaaccacatgtctatgcttttgaggaaattttacaaactgaaatttgcctggcttaattacaaggatgcttggtttttctatatcagctaatgaatagtagaggttcacatttccataccaagaagggaaagaacatcctaaactcagagcagtcttcaatgtgggaaaccaaatgggatggtgagagggtcaagtttcttgtctttcatttagaatatagcaggactcaagagctgctcatcttcagggaatttcataggtttttggctagggaccaatctgggtcataaaaagaggaaacccccctgggcccaggtagatctctaaagaaaaagctttggttgcctgggctttgtttagcaaaagaatatttttttcttgtcctagagtcagcaaacatactgccaggtaatctgagaggcccacagggagactccaagaagacaagcccaatagtcccataccaaaatctttcatcttgaaggccattaatgtgccacatcttcactacatttccaaatgcctactgcctttgggtggcatcacagcaataaacacaggacttaattaaaagtcatttccatttcattgctaaagccaaggaaatctggtaccacagccttgaatttataagtaggaaaatggtacaaaaaaagtgagggtgggaactaatttaaaacactaaaagtcactcaacactgccagtgggtggtgcaggatattgccatggcactttctgttaaatttctttctcccaattctttgcagaattctcctcacttttgtgtgcagagagccccactaactaaaagcaacctgagtattagatattatcaccatgaagggttggggcaatgggacgcatcaaatggcatcacccgtcagggaagtacaaacctgcatccactgccctatttctaatcttgactcaccctatgacagggtcatactcccctcatcatgagaggttatgggggagtttgcacagctaacaggccactgttactccctgcttgtttgtcggcaagaaaagtgcagaaagttcagttgctcccattggccattggacaaatgcccagttgctctctggggaaatctgattgtgtcatagttaattcctccctcacgcatgcccctcctttatagctgcttagttgccaagctctgtccattctttctccattgtatttcttgaattagtccctttcttttattcctactgcaattatcctcagtgaagttttcattttttcttgattggactattgctatatcttcttacttggtttcttactgctaggatctatccactgtaatccattttacatgtgacttgtagtttagtctccctaatacatgtctctgattatgtcactcttatgttccaaaactcatggtgattctttgttgcctgcactggtcacaagtgattctgcattgcctactgaccaaagtccaacaaataaattgacagctttcttcacaaagaagaaattgtcctatgactcacatgttaccccataattaaaggactgagacctagaaagttactcaaacttcaagtagcccatgccccagaggtaaatttcacttgccctatttaaacaaggttttcttcgatatattctccttgtcacaatcaaaaagttctttccagtgtctgccttgaattatcccctaagctcttgaactctactatctttaactattatttgttttaatagcaagttccactctcagaaatgagactagcaaataaaaaagaaacaagtgactcccaagaaaaacaccagagcatgacatcatagtgagttgaaaggggctgaagttggaagtgggctaatggctgtttatgatttttgtttgttcaacaccatacgtcttaggaccttaaccctctacagactattatcttgatggtgatgggtatttctctgctgcacttatacttcccttcctcaaatcataaaacatttattatatatcaccacaatcaagttgtaataataatccacgatgatagcaatagtctaatgaagaaatatgctctggtaaagatccttggatatcagagagcagtgtaaagattgtagaggacaggtgcagtggctcacgcctgtaatcccagcactttgggaggccgaggtgggcggatcacctgaggtcaagagttcgagaccagcctagccaacatggtgaaaccccatctctactaaaaatacaaaaaattagccaggcatggtggtgtgtgcctgtaatcccagctactcgagaggctgaggcaggagaatcacttgaactcgggaggtggaagttgcagtgaaccaagactgcaccactccagcctgggcaacagagagagattccatctcaaaaaaaaaaaaaaaaaaaaaaagactgtagaaagcaacttggagaataattaatagaaaaaacaactcagacagtttacccatcattagagcattgatatttctggggttgaatgcagtagtggctaggaatggacattaacttttcacactgaggggaataacacactataccacacacaatgttgaggattcaaattctagagagtgtctttgtcatgtgttaatgatggatataaaggttctctatatgaggcctatgatagtcaatggtcattcctctaacttgggaatggtatgggctatacagataacagcctagagagttagaagctaactttctttcaaaaaaagatgaggagaagaagggaagggaagggaagggaagggaagggaagggaagggaagggaaggggagggaaggggagggaaggggagggaaggggagggaaggggaggagaggggacaggaggggaggggaggggaggggagctcagcaaattctggggcacaacttacaattttgcctgatgtcttaccacactgcacagctaggaagttcttctgaagatctaacctgtgtttcttctggtgtttttgtttatttgtttaccatagattatttatagcctttttccaaacagagagatactcacagcccttcccagttggctgtttggctcagctaacagagctgctctaaaagtcatggttaaaacttcattcccctaaaagggtcatcgagtttgctccataagagagctatatcaatcacccttcctaaatgacactcttgtcatacatagaagagaagccaggcaggtgagtagatgccattatcaccactgcttctgtctattaaaaaaataaaaacaagatttctgcctactctccaacccagccaaagagagcctcagagtcagacacctggaattaaccctcatccctgcatctacagaggacgcctggccagagcagtgccggcggtgacagagctgggaccactgacatctgaaatgcatcctgcactccagcccttatgtggtacttgcttgtctcataaaaccattttgttttttgaggatggagataaggtcctttaacacaattttcaatctatagttgtactccaacgtgttccttatacatctacaatttcttctatcttataaaataaaatacacccctgatttcagaaaaaaaaaaaaaaagcacagcattaaaaaaaggaatctgagaggccacgaggcttttcacattttgccagaaccaggcttttgtctgtgctggcgccctggagctcagggatttcttaggaatgagagtacaagtggccttaggacctcaatgattggaaagagacaccttgaaggctggaaggaggaggtaagggcagagttgcatccaatctgtgctcatcttcctgttcagaattacctgggcaggtagcttaacatctcctaaccttggtttcttcacctgtaaaatgagaataataagacaacacatcccacaggatctttgagaacacgtattcaatggaatgaaaccctcagcacaatgcctggcacctcgggagtgaccattaacgatgcctcttgttattaatattatcacaatcatctcaggggggcaaagtagcaaagactgaccgtgggaaagagagctgtgggaaagtgacagaggtgctgccatcccctcggccctacccatgaccccactgtcaggggtgcagaatatttctcccattcaccaggtcccaacccactcccagatagagcaacgtggtgaaacaataaaagcctgactcccgcaagatggcaccatgacgggctgtgcctggatccagaggagatgtctctgtccagcatttccatcaggctcttccgagccagctcctggggtgcgcacaaagacccattcaggatggctggagttctgaaagccagcagatgagccgaggggccgggaagggggtggagaatcagcacagcccctggcactaaccccactgggacctgccctgggcaagcaggcgtggagggctcaggtctgccgccacggctgcactctttgttttcccgcagattccgttctctgatggtggtccagggcaccaaggacaccagctgccatggctgggattgaatgacctccctggggtggctgggaacccccactcccatagtgccagcccaatgggcaggatacccagtggaaacaggccattactaacaggcctgccatttcgaaagtgcctctttctgggaaaattgactctcagaggttcccaccctgggaaggtacagtgagaaataagaagctaaattactatgcagtagccaatagttattccccagggcctagaaagtgactctgtgcccctcagcctcagtttccccacctgtacaatggggctaggtacaacaacctgttggaactcaaaaagtagctgctgtgagagaacttatcagtagtagttggtttgttccctttgaacacaaatatatcagatctgatgcatcaaggatatgccagtcctgcagctccctgaatgttagagcacagaggctgcttaatggatcatgatccttggatgcaaatgaaaataagattccctcttttactctttccctcctaagtctataagaggctgtcctaacaaggtgacaagctgaacatgcaatagaaaactgagcccctttaggctgccagaattgtaagacatttcttgtgggacaacagcatttcccagatgactcaattcagaaggactaaaaggagtttctgtgacctgaagatgtttgtacatcagctaatctagctttccacctttgctggaatatgctgactgcatttatttctctagatatctctcacccaatagtaagactcagtagaagcactacctcctccaggaagccttccctgactacacagcttgaattagtgcactttcatattctcccacaacaccctgggcacatatacttctctcttagcaatcaggaaattatattgaaattgtctgcttgttagtctctgtcttcttggtgaccaggtactatactttacaatcttttttactccagtatctaatacagtgctggcataatgcaggaatttaataagtgtttattgaactacatggatgtgtatctctctctagagtatttgctagcataaacccccatttgtattttataagggtatcccataacctctgctcttaggaagttctatctcatatctaactcagttctctcctgcatgcatatatttctcttttttcaaaccttgggagaccacagccggtcacgatcctcattcttatcagagtgatcatagaaatcacaacttgcactcatcattgtttttctctcaggttcagctttattttttttggtctgaaatcaggaatgaactttcacagtctcaactctggccatttttccttttaacaaacaaatagaaaagaacttccaagaatgattttgaccagatagagtctgctccttttaacaagattgtgtgaagcacctactgtgtgccaggctgtgtgtgatggagagggagcaaatgcataagtccctgacatcaagagatcttcaacctaaaacagagaataatgggggtactgaatttaattcataaaaagtagcaccccactttcttgtgatcccttggttagaatcaccaacttttatgagtttgtagaaaagcccagagtgctaaaaagtaaaaagcaaacattccatttctgagcaatttgggagaaactaaatttggcccagtcaggagacacgttggggagtaccttaaaggataagtgtcaagtgtctgttgacatttctaaagaaatccatttgcattttcactgctaaggagaggccggcctccactggccacacattcagaaagctggcaggagccactggtcagcaacccccaatcaaacaggcttcctctttctggccaaagagctcagggtctgcgtgacttgaggcaagtcatccagggacatttgggattctgatctagtgagccagtgaagacggtacagataaggcccagacagaaatctggcagcctaagtaacatctggttggtctgaggtttggactctggctggggccgggagcccagggctggcgactggggagcctgcacttggagctggtgacagcaggtggcgcaggagcgcagaaaccaaccttcagtgggccctgaaagaaatcatggtgttaatgccaccccaaaccacagccaagcaaggcaaaggcgaccatgttgtcctcaagtcctgaaaagggcaaattgcacagatggagcaaagaaccatagatgggcaattctccggtaaagaaaagccaaggtaggtcgtcagagatctaggtaaaatccttcgatggtcaaggacttcagaactttaggaaatgtgcaaagaaaatgaaagagaaagacaacacataacattaagttcaggagcaatataagagctcctggagaggaaaggctcaagtcactttgaacccttagggcagctgatgagccaggtatcattctccaaatagcctctccttccctccagcaacaaaacgcaaacagaatattcacaacaaaaacctcacctattacagttagtaaagcctcgaaaatcaacatttttaaacaaaaaatggaaatgttatctccttcttaaagctagtagaaggcaccttcttgttgccccaatctctgcataagttctcctccaaagcatatcactgggggaagaagggagaaagttcccctccagtaagtatccaaggttcttctgtttgtgtgcccaaaatgggacaaaaaagcatagtcctacttatctatttacctaacaccataagtcgaggaattttaagcagctgattctaaaagctagaataaaagcgttacacacaagatacgagacaacctccctccaaaagataacgggcacaagcagtagactgctgagatatgcaatggagaatcttccctcatccacttaagcagtaagggttggctttgggataaatctcagggaatgcaaagaatattacttatttttccatttggtttactttcatgttgttacttctctcgtgggaagtagatgcctaagctctgatgtatataaatccattttcagtgtttacttaagtacatatacatacactatagcaaaatgttgctttgcttgaaaaatcattgaaacatttgatgtgtttgctctcaatcaatattctgcaaaaagcatctgggttcgctgctcaactaggacagtagacaagtctggagtcttttccatgagccacctgccacttgccagctctatggggtcccacatcacagttgtcccagtagcagacagtataagggctatgtgatttaggctgcaacaaagggtgatgacagaacagagaaaggcaaggtgaattccctctgaatgtgaccagaaaggcttcatggagaaggacactccagttgtttgactactccatgcctttggacatgttttttttttttttttttttttttttttttttgcctgaaatgccattcctcaactcccaccatcatccttttgggggaatttccagtttccttcaaaactaagttctgatgttatctagagccctccctgaccatcactttgccccttagaagtcctatacaaatctcattccaaatacatggcacaggaatgatgcttgtgtctttgttgttgtctttattataatattcactcaccagctgggagactcctttttttctaattttttttttttttgaggtggaatctcgctgtgtcacccagtctggagtgcaatggtgtgatcctggctcactgcaacctctgcctcctgggttcaagtgattctcctgcctcagcctcctgagtagttgggattacaggtgtatgccaccacacccagctaattttttgtaattttagtacagacagggtttcaccatgttggtcaggctggtctcgaactcctcaccttgtgatccacctgcctctgcctcccaaagtactgggactacaggcgtgagccactgcatccggcctttttctacttcttaatggtttcccagatacctctccctacagctcctcccaactaagtagggttgccaaataaaaacagaactgcccagttccatttgaattttgaacaaacaacaaatagttttttagtgtagtatgtctcagatacttcatatatcatattctcatttgttaactatggcagtcttattcctgagatcactgagttcgtgccttgtgccccctccccgccctagggcaaccattcaaagcttcaggtgcactttctcagcattagcctctctccccagccctccagaagaaaggtgacactccttgcacacactgttagcagcctggaagagtcatctaaggtcagtttcagatccattttgagattttttctttttctgtcctgtattggctgtatttattcaatagaagtcaagtttaagtgtttcaattcaatataataccacttgttcaattaattgttaaataggagaatatcacttacttttcatttaaatgtggtttaacgaattgcatgaattacatgactaagacactttgcaatctgttaaatccatgttgaatttcaaagtatggcaggctgggtgttgtgacatttaccttttcagctcctactgtctctttctaccatttctctcctgcagaaaacaagggagatccagctgggaaggcagaaatctgcagaaacacatccaatcctatcagagtgcccatcaccgagaaacacctttaagttaaagttgcccactttatttcactatcttgtcaaatggagctttaaacatgaaaatagaaacatcttggattcttttaacaagtcccttctaccaagactaacattgttttccatttacatccacttcccagggcgaaaaatggcaaaaaggataatttgtaacaacgctgccctaccttttttcacttcatgacaggcacagaaaattataatagctgaatgacagggatcaattggaaagaatttgggagattcagtatgaggcttagtaataaaattaattaatatgatttaaaattaataaaaattattttgttcattattttaaaatataaaatgttatataaatatattaaatgtgaaatttgcataacgtctcccagttaatggtattctatttagaaatgcctaacatctgattgtaaaaggtaaagataaaagtcacgtatgccttctaccttattagaacaatacaaaatataagagcaaattaaatcagaaaataatctaatatttttatactgcaggcaaagcgaagaacttccctgagaataaataaatcatgactaagaaaaaattgaactcatactaggacattttaacaggaagctccagggagtgaaatgtacttcagctgtcgcacaacacgctctggtggcagtgtccgttcagagagtcgcatacacctaaacagtcatcacagaagctagcgagtttatagacaaagcgatgtatgttcaaatacacttgaaaatttctaaatggttgtccaaatgattttcatactctaccactacaaaaagcatgcaatcatgaagaactcagggcacccctgtaggccgttccaggtgcccccaagaccacacagcacctctaggaagctccgccttataggaagaggtcacagtgtgcttacgtcctggcacattttaaatgaatgaataccaaagaagagaatttaactaaatgaaaatcttcccctaactattaaagattgtagtgggaaaatgcagggatagcctcccttccctagccagccctggtgtatggaaagggcaggtgaaaccattctgttcaatcccacgtgcgagtagctgtgagatgccaggcacggggataggcactggagagagaaaatatgcaaacaccttggtcctatttaggatcagctcacaatgtggggagtgagactaatagatataaacagagatccaagagaatctatggtttatcatcatcacgcctgtgataagagtcaatgattctcagaattcaaggattcttctctgctcaccctcaatgtatgctctaaccagacacacatgattttagcatcgtgctgtctttctcctgaataattctctttccccccaatagcttgctttaagcttgcttcttaagaatgtttttctcctactgaagagtctgccactgttctccctctcaatctcagctagcgcagatggtttcagagcttgggaagaagagcacagtaccaccggttaccattttgtggctgtattcctacatgcctcgaatgttaaactcagatggctggagagctgggttgacaatgaacccaacagtgtttaaggaaaaagagttttctctacgcatcccattttctaggcctcagcagggtttccttgagcagatgactttgaaattgtcagccaaacctgtgcctctcaagagcctgtctcctttagttccagccctagaaggatcacagtattgagccatgtggttttgttgactctgtcatggatggcacatccatcagggagtcccatctgagcccccagcaaaacaaaattaactaatgtgcataaattagcaccaaatgtctcctctgtggagaaatgccaaagccattctttcctacaacagataactgaccgtcccccagttcccatcagactctcttcaacaacgacctgcacctcactgcaccttgtgtttgcttttataccttaccaaatgatttcaaatgtatttcctcacttgatctttggcatttgggagggagacaatgtagatgtttcatttccattatacacatgactaaaataaagctctgaggagttaaatgacgagcccacgtcacaccactgaatcttgaaggggtggctgttggaccaagatcttctgactctgaatccagtattctttccactaccccatatccagccagaagcaataagaaaaatatttgggaaaactaacactgaaggagccagcatgtctctttcttgttctctcaacctccaaaacaattcaccagaaatctctggcaagtttcataaatgtctgagtcacctttggtgcacagttgattctgaaaaaaactacacacacatatgcacacacacacacacacattgatatatgcataaaatgtattatcatcccagtattgaaaaatctttatcatgttccatgttcttctcaatgcagtatgtgcctataacctagttcggtaactatttgctgaatgaatacattaatgtttatctcccttatggctacatcttcttttacatctcagaatcattcttctatttcagtctgccccataccctagctgcccctaccaaccttgctgcagttttggagcaggctcagcctaagaggaagacacacacagataaatgaatcacagccagacagaaataaaacaacagtccctattcgttgaaacacaacctataaattctagcttcagagatgagtggggtaaataaatgctttactcctttgagacagataaccccttgaaatagatatgcaaatctcattttataagtgaagggctatatgctcagaggagttaaataaccagtcaaagttcacacaacaggcaagtgacagaggccgaatttgaactaggttctgaaagttcagtttactgctgagtatctagtgtctggcatggtaaccggcctctctgatgcttcttgaagaggtgctgtatgatacacttgaaggcttttgtactggacgtgtacttggccttcaaggctcttccttagctatttgctagatggtggttaactctctcacctcctctgagggtttgcattttactcaataagccctccgctcaccaccctaaattgcaacccatcatttcccctgcctccctcactctagagccctcttgctctaccttgttgtttttccataaaacttattactatatctcacatataaaatttagtcatttattatgtttatggttatttgctaagtgggctttgctatagcatgaatttttgtctttttttttttttttttgagatgcagtcttgctctgttgccaggctggagtgcggtggcacgatctcagcccactgcaacctctgcctcccaggttcaagtgattctcctgcctcagcctccccagtagctgggactacaggcaagccccatcatgcccagctaatttttgtatttttagtagagacggggtttcaccatgttggccaggatggtctcgatatcttgaactcgtgatctgcccgccttggcctcccaaagtgctggtatcagaggcgtgagccaccgcgcccagccggatttttatctttttaaatgtactgatgcatcctgaacactaagaattttaccagaaaaagagcgcgtgttcacaaaatatttgctgaattgaaggaatacatgaatgggagatacttattaatggtagttaatatttggtgaatgaatgaagagtcaagactccttgccttatctaagccatcctgtgaatagattccatttgttacgcatctcctgcctgctaggcccagtgatgcataagtgatctcacttaatcagcccccaaatcctttgagatggagaatagtacctcatattctagatgaagatatgtaagttcagggaaattaaattaaattagccaaagatcatacaactggtaagtaagaaaggcagaatttgaactcagttctgtctaacttcaaagttcaggggtcattctgccctgtcacggcgcttctcaatgcactcacaactagaaaggtgctcctctgtaaatgaaatgctgccccatatgaataggtaagttttagccattcatagttaatattattttctcattagactcatgttcaactggagacgcttccattaactgagatgaggctgtttatttcctccactatcctggagctgggcagcaatgctccatgctaaaccaagcctggtaatttacatttctaatcactccacaatttaattaatatcatggcctttatcaggtgcactgcaaatacagctgatgtcatcagtgcttacttaattagtttgaaggagaaaaaagtttttttacagtctgaatatgtctccactggtatggcctcagggttttgtggaggaaaaaagaaactaacttaaaatctggattctgtgattaaagacttttttgctatataacctgggaaaggtttatgaaattgtaatatcactggaaataaaaatatgaaggtaaacaagtggtaatttcaaccattttttccaaccttattgaagtataatttacataccttagcattcacccatggttaagtatacaattcaatgatgatttgtaaatttatagagcttagcagttatcaccacaatccagttttagaacattcctatcacccctcaaaatttcctcaagcctgtttgtcaccaattcctgctcctgccctacccctccccatcttctgacaatcccaggcaaccaatgatctgctttgtctaaagtttgtcttttctggacattttatataagtggaatcatacaatatgtattcccttttctcccttccttccttctttccttccttccttcctttctttttttctttctttccttttttttcgaagtcttgctctgttgcccaggctggaggacagtagcgccatctcggcacactgcaacctctgcctcccaggttcaagcaattttcctgcctcagcttccggagtagctgggattacaagtgcatgccaccatgcctggctaagttttgtaatttttgtggagatgcagtttcaccatgttggccatgctggtctcgaacttctgacctcaagtgaactgcccacctaggcctcccaaaatgctgggattacagatgtgaaccatcgcacccagccatgcttgggttctttcccttagtatgtttctaggttcatctatgttacaccatgtgtcagtattctatatcttttttctcattgaatagcataaatgcactccattttgtttcatcactcgtcagttgatggacgtttgggttgatttcattttttggctattgtgaacaatgctgctatgaacattcatgtacaagtgtttatgtagatgtgtactttcatttcaaaaaattgggtagattcctgagaggggaattgataagtcttatgctaagtttccatttaattttttaagacactgccaaactgttttccaaagtggctgtttcattttacattcccaccagcaacagatgaaggcaagcattgatttctgaaattgctttagatagtggaattgaaagtcttcagctttggttacatttggtctttgaactgcaaccttgaaagaaaactgtgaaatacctaaatcatactatatactcttaaagacaaagaatgatgggaaattaattgaaataaatgaggtttagataacagaagggatttgtaacaagtaagtgttctcagggatagtattttcagctttcgtttgctaggaaattaaatcaaccaattaaataaaataactctccataaagatcagttagatttgccatatagattgttcatttacgaaaatgcactttgagagttatgtaacaaagacactggtttcatttatttcattctcccttcctttagctccacatcttggaaagaagaaatatcttatgagcttcatccagttttagtatttactagtaaagctgaattgagcccacttccacatggaagctataaattgttttatcttgtttgagatcttcagacaaaactcctgcatcaccaagatgatgcagccaaatcctaagatgcaaatttagttgggaaaaaaattcaggctctctatttcacagttcattagttcattcgtttactgtggaaaacattaatatgtttcttgagataccaagactcctaaggcatgggttgtggcttcaagagagaaacaagcatgtcaacgaatactgcagtaaaatattgtaagttctatcatgaaaataaatacaaattggggaacaaaaccagacacacaaaaaggaatagattaggaaatatataatataatataatatatataaaaatataattttgacttaagatcatgcaagaggtaattattgaattgctacattaaagacaagtagatgtttgccagagagtcagccatggggtgaggggtggtcattctagttagatgctctagcaagagcagaggcctggagctgtgaaacagcagagagtgtctagagaagtgcaaaatcctgcagcatgtctggagtgcccaagggacaaaccgagtggatgaggcagaagagaaaggctggtgagggccttatttgtcttagcaaagagaataagctattttatagaaaatagggagctattttatgctagatctgacataagattggaattttgctcagtttattttgaatgcagtaaagaggacaactcagagaccaattaggagactgttacagcagccaggctcaagtctgaactaaggcagcagcagtagaagtaacaaggaggcgtaggatatgagtgatgttaaggcgtaggatctagagaagttatctggggtggattaccatgatctcaggctcatcatgagatgcaaactttcaggtcctataggcatgattcacaggtctggactttggcctaggaatcttcattttcataagcattccaggtgattctaatgcatcttgactgaggatgctgacctgaagtttgtaagctcacaatacagaaccactgaatctccagctaccactggaaccaggggaatcaggagacttctaggagtaaatagactgccaaatgttaggtgaactttgctgctggtctttgctaagttagctcctcattctggttcagataactttgaaaaagaaaattgtaattcaaaggaaaacaaattgaaattagtcaacaaatgcaaccaaatttaatagaaatctcttgcccatgtataaggttccaaatagggtatctcatactcatctaaaatgaatttctatgtcaccacatagatcaataacatttctatgaactaattcagtacaaaaatattattctgccttaagagtatctgctctctctctcttgttccctctccctctctttcatttctctgtctgtctgtctacctatgagacagagctcagtattgtctcttttataccacaaactccaaaagggtagaaactctacgcatcaaaaatcatgttattctggcgtgcatatggaaaataagtgcaaaataaatgctttgtgatgatgaatctgcaaatatgttgatgctttatttgcatattgccatagatgctgaatgtataatttgtgcattatgccaatttaagggagtgggggctgcgctgtgttgtgttttgcacattttttaaatgcaaaaacaccagagcaataaattaaacattttaattaagtgttgtagcatactgctagtagaattcactgttacatggctccgataactgtgtgtcaaataatgtccttattacacatctgcatttactacaagcatgacagaacatggttagcctatatctggtcaactttcattgtgtccctcaaccagaatgataaatattgtcaaatacaatcacctacatttagtgcctagttatttcgtgccaggtactaagtgctttacatggaagatttcattgaatgttcacacagaccttaaatagttgatgttattattagctccattttacagatgagaaaactgaggcttcagttaagtaaacatggtcaagaccatgtgataagtaattagggagtaagaatttaacttaggtcgagcagagtgagctcttaaaatgagcccattatttcttaagtttcctttcaatgtgagcaatgaaataagtgaatgtcatgtgatagaaaacgaagaacgaaagaacaaaatctagagtatggaagatcctaccccacaatggttatctgtaggaatcaccaactggaaattcaccctacctctctttcagtggtgtgatggtcaacgttcaccatgccgctctccagggaagaaaaagtcctgatttgtagcatttgcagatttccgtgttgcaaacactctcaccaaccttccattactaaaggtggagttaggaagagatcacacacacaactggtttgcatgagctgctgagagccagctccaggataccacagtgcctgttcccttctgaagatgaaatttctcatcgtctctggacataccccagagaccttggaccatggagaagatacttacctttttctgtgggaggagccagtgcatggaggaagcgtggtgctcaactgtctacatcagagtgctggaatgtacatgtcaccaggctatttttcattaaaaagtgatgacagctaaatatattccctgactctgcggctaataacttcctgacttagacctcacttgctagacccattcctgaaaccagaccgcactagtccctgtggggcttctattattggtgagccatctcaacagatgcaggtctaaccaaatccatgtctaatataagcatgcaaattgggagatgaaagggaaaattttatgtgctgaatcacaatccacagagagagaagtaggggcataagcagctgcctggaagacaggacaccaaaagtcattgtcatagaggtcctaagcagcacagggttcattccgtccagccatcattcatagctatgccctttgaatattcatctctcacattaaaaatatttgcctggctaccctgttatgaaggcagtatgtgtatatcaaagcatggtttttgcagtgagacacacatgaagcattttatctgcattttaataccatttaatcctcactattattatgcccattttacagctaggagaactgagtcacaaggacacaagtggaagttcttgaattaaaaccaaaataagcctaattctaacagctgagctctttgccaatttattttaagtctcatttccctgctgaccaactctcccttcgtcttgcttcaaaaaccacactaatttcttcttctcctattttctttttttttttctgagacagggtctcactcccatcacccaggctggagtgcagtggcatgatcatggctcactgcagcctcgacttcctgggctcaggtgattgtcccacctcagcctcccgagtagctggaactacaggtgcatgccaccacacccggctttttttcttttttttctttttagtagagactgggatcttgacatattgcccaggctggtctcaaactcctgggctcaagcgatccacctctctcagcctcccacagtgctatgattacaggcaagagccacagcaccaggcctatttcttcttttaagagcttgccaaatgctactatcttaacttggaacttctccccacctccatcccttaaacctatccaagttctagccacgctttaaggctctagtaggaaagtctcaactttcctgtaatgttttctcagatgattctaacccaggtagacatcccactcatattacatgtactgcctctgttggcattaatttggcgttgcctcagttgtaccatttcataacttgtttggcttattttctgacctaatgcgcaaattgtcaagggcagaaaccatgtgtagacctcataatgctaagttctaagtagatactaaaaatttttttaatgaatgaataatactgataccataggtctattgatggactgaagctctgaatattctagaactgggaggaagattcaacatttttgaaggcttactacgtgctaagccctaagttaggcattttatacaatgattttatttaaacctatatggctgatattgtgacttccattttacagattttttaaaaggtccagagaggttaagaaatttgctaacacagggctgggtgtggtggctcatgcctgtaatcccagcactttgggaggccgaggcgggcaaatcacgaggtcaggagttcgagaccagcatggccaacatggtaaaaccccgtccctactaaaaatacaaaaaattagctgggtgtggtggtgggcgcctgtaatcccagctacttgggaggctgaggcaggaaaatcacttaaatctgggaggcggaggttgcagtgagccaagatcatgccactgcactccagcccaggagatagtgtgaggctctgtctcaaagaaaaggaaatttgctaacacgttattagattgtggcagagctacgacttaaatgtagactagtctgactccaaagcccgcaccacacagccacatgggtcatcactgcatctgtgaacgagttaacctacacaaaccccaggggacggggatcgtagctagcccagaaagaaatgacaaatggtcacttggtaatacattctaggttctgttaactctaatattcagaaagttgttcttcatgtctgacttaattctctcctgcttccatttcatgccatttccccttgttttgtagtcaagcatatggaaaacatctggctaccatttcctagacaccactccttcttggtctaaaaaattcctgtggtagcagctcaactttattttgtgtcatctaaaatatagccacacaccttttagagtgtaggttgtcctaactgataggctttcctacccaggcagaattatagctgtcagcagggaaaatgagtgagagctactggcaggatgagctaatccgtggtcagatgctcttggatcaaagattcatgctgaaaccagccgtcagagcaaagaagccaagttcatggatgaaaaaaaaatgaggctgggaagcacaatgcaccccagtgacctaccattaccactggcctcaaaatagccttggagccaggatagggggtgggagaatatagaaaccaggcaagtaggccatggcagagattaatttggggaaaccaaggatgggcagacagcccccatcccctggcatctggggaacaagggcagctgtacaggaaacataaaaacacagtggagaccagaggaggggagtcaaatgagaatgctaaatgtttggaacccagtggctaagaaagacgttgccaagtgtcacactgaaaacaggaaagctttcctgggccctgggtgtggaggccaccgaacaatgaaaggggaagcctgtaagaagaataacaatgacacggaagcctgctccagcctggtgaaatcccttctgcagtttttacaagaagcaaaacaaacaacagtctgacccctcggctcgcccccgacgccacaccccctcctcagtccgcatgttgggtcaggaagggcagtggtgtggccagatccatgaaagggattctaagaacaaagcctgtgccgtttacctgcagatcaaagtttgccgttaataacatgtgtgttggagagggcagagagaggaccgttgcccctgcattccattaaaaagggattatgggctgtctgaccaggtaagcagtgtgatctgtgaacagaaacttgtcctttggaagtggggctgtggcaaaacaaaagccttaggagacgtaatcagcaaccgttcactgcagcagggcgggtggcgcggtgtctgtgtttgtgcctgtgtgcaagggcatgtgcgatattttctgctgttgctaagatgggttcccccttcactggcctctcgcccaatcgaaaggtagctgctcctcattggctgcctggctttatcgaatgaccatgacgagctggagcgaagcccacctcattggcttattcctatggccattgtcaggggagagcaaatcagacacctaatcaatattttgtgaagtggcactagactcttggctaaatttgcattaaatttctccctgtctgtgcctttgcactcagataagcatcatattaacttcggggatagagagagagacgagcaatcaaacactgtcatccttcagccattttggatgaatctctgagtcttggcaaaaatcttggagtgccgagcgtgcaacagagaaattagtcataaacagatgcaaacctcccgagcagagacatatttaactaggctagattagtggtggcccttctagacaaaaactgatttacttccttccttcttctttccttccttccttccttcctatattcattcaacaattatttattgcacacctattctgagtcaggttcttcgatggccccggatatatcactgtgccaggcaagaaatatttccctgctaggtctttcagggtgctaaagggccggggttcatcacatggtaaattacctggctcttgaagaaaagagagggggctctgatcatcatccatggaacgagatggaaccgaagtcccacagatgaaagtctcctgagtaggcacagattctgaatgaaaaactggcctagtaactggagttccccagaattcaacatgaatgtcagttaaaatgtggataggtagtggtcctgaggaagagaaaaaaatggatgtgaatacatttcctgtctttcagagaaaaccaggaaagaaattccacatgccctctacctcccatcactaagcagctaagctatacctgcacccctgccctctgcgctccttcctgttggaacaaacaacgaggcgtgtttctatcaaaatcaacgctttggcttgtgtacaagtcccagcgccattcgcccactcaagcatctcctgtcattctcaccttgttctcttacatcatcaaattttcaatcttcccctctcatcatcattaaaaaatgctgcaatatccctcatctttaaaaataaagataattaaaaaaaacacacacacaactctttatagatccaaggctgatgttcagccagcgcccatgagcactattatggtgattgctaaaatactgaaagaattctggatgggttggtgagcactgctaccctgagcctcccgagtatctgcctctgaccttttccaacctagcctcttccctgggacctcctggacagcctataatccagaaaccaaaaggttaatgccaggaccagcaaagtcctccaagaccctgctccagacctataggcagcatcccttctgactgctcagtgcccatgccatagttattctaatagcatccctgcttagacacggcattttcttcgagtcattccctcttcccctcgccactactttcctctcctttagagtaaaacccctggaagagttgtctatcctgtctccatttatctttttttcttttttgaacccatttcaaccagattatgtttccaatctctccagcatcacttttctcaaggttatcaaggaaacctccactttgccaaatccaaagatcaggcctcagtcctcatcttatttggcttactagtgtcatttgacacagctgaccaattccttttccttaaaacatctttttttgttactttctttccttgtctctgagacgccactttctcctggctctccttctttccgtcggtctgccttttgctctccttttctggttccgtctcaccatcctggtccctaaggctgaagctctctagggcccagtctctggaatctcatctattttcctctctgcattcactctttgggtgatctcttctagtcccttgacactgaataccatctatatgccaatgattgtcaaatttctatttcctgcaccaacatttctacactcataatccaattgtcactctgcgccttcacttgaatatataatatacatctcaaatttaagttgtgtagaactgcgcccttgctattcccatcaaaacttctttttcttgcccctggtcttcatcttagaaagtgacaacatcatttttcctattgctgaggccaaaatccttggagtcagccttgactcctctcttttctctcacaccaaactataatctaccagtaaattctgaagccctaccctcaaatcagacccagaatctaacgatttatcaccacctcccaccacagccatttaagtccaaaccactatcatgtgtctcctttattaatgccatgatgatgcaaaggtttccctgctgtcagcccggccccttttacaatctcttctttgcacattggctgaataagtctcttcaagtaaatttagttcattatactcctttgctcagagtttccaaatgggtttcatctcgcctagaataaaattcaaagtctatacactacagttagacactaaatggagcccacacattattagctgggttccggctttgctccacagtgtggccatcttccaaatatgttattcatcacaaggaagactgggtaagaatatgaatgttttattatgcaaatctaaaaataaaacaaacaaaaacaaaatatttgttacaaagttaaatcttaatgatggtcccttatgaacttcaactttttatttaagggcactatattgccttaatgtgcattaaaatgatttcattttgtctccattcataccatgagctgaaattaaattatgtctaattgtcagtgtacatagtgggcagtattgaatcaacaaatgcttagaaaatgacctttttttttttgagactggttctcactctatcatcaaggccagagtgcagtggagcggagcaatcatgactcactgcagccttgacttcctaggctcaagcgatcctcccacatcagcctccagagtagctgggactacaggcatgaaccatcacatctggttaatttttgtatttttgtagagatggggttttgccatgttgcccaggttggtcttgaattcctgggctcgagcaatctgcccatctcagcctcccaaagtgctgggatcgcaggtgtgagccactggacttcttattaattacctgtgaggatgataatgataatcataaattgaatattcctgggtaagttatggcattttatgtatttaaattacatatatttccaacaactttatctccattctaaaggtgcagccacagttttgtggctcagaaaatttgatgccttaatcaaggtatagtacttgctatggtaagtaacacagtttgagagcaatggtctgtgtggcttcaatgtttgtgcttttgcaatagccatatcatggtgaaccatttacagatgtaatacttttgtctttatcatgctatcatcattattatctcaacaaactctaaggatcactgacaagtgagaagctgatactgctgtccttggtctatgaatgagtatgctgagctccaaagagcctcaagctcaagtaagaagaaaaccccagtcctctgttcccctctcccagtatgtttcccctagtgtctcatgctactttacccatatttttcttagctaagtgagtgaattggacctatttacccttagagttccagaacagatttcctagaatctatcagtttgcaggtcacctttttcatataccatgctttacaatgccaattccccatctgccagaacataagccttctttctgaagatgctctcaagcccatggggagctgagctcaaatgtactaattttctgatgtcaaattccaatcaggtgtttgtttttaatatgaaaaagaaactagacaaattcaaaactgtgcacatgcacttgtatattctgacataatccaataaagaacaacttcctatgtggtggagaatctcctagatttcatattattttttgagaatttagtttttatgaactaatcatgacttacccctgtttgcaccaaatatgccccttttgtcaatagcctctgtgttgaatgattcttctgtccttggtccagggaagaaccaaggagggagaatcctattgaggaatcagaacaatggagtgacattgtgtagcctctgccacaagaaggctgatcttctaggtcacataaatatgaagccccagctggccaagtgaatcaggatacaagtatagctattaggagatgcatgtcttagtttcacttctctaaagaaaacagaaattcatacaaagctctgccatagggtcaacttcatgggttgaataaatgaatgaatggtcattcagtcattcaacaagtacacctgctgttttcaagtcactgctgtcagtgttacgaagagaaatcctttttaaagttcttcattgtatgtacaagttatatataaagagtcactttgactgaatgttgctgctagatacttcagcacttggatacctgcacattctgctgaaggaaactcaccctgggacaatcagggttagagaagcaatggtatagtaacacatccatttagtacagtccgcagaaataattttaacacatatgaaacacaaccatgtctaatgaagaaagtaaacctcttttaaatgaattgctaatattatagtctacttagaataaatattttcagacaaagacaagcccagtggttgcacaagctaagcaagcccagcttattgtccaggaatttaaataagtgcattttttaaaggtatgctaattctgagttggtttattaaaattaatcttggagatgatttttcagcaatcaatgaatttctttaagacgagttataccgttgagatataatagtcagatgctgtcacattcatagttaacaagctttcttctaagtatttttcatgtgtgtgatctgtgatcataagattcctgagggcagaattacagttactctttcaaagaggagtagcttcttatcctccaatgttttatcagtgctgagtacagaaaggactcttgtacaaagttcaaaacagaaatagacggtctcactaacaggaatacttatatggactagaaaaaggtaaccatgacaccagagaccaagggcatctataatacaatggggacctaccaattcacatgattcagagggaaaagaaactgggcaggtctggcttgcttctcttggtacctccatgaaatctgcagggctctgcaaagaacagtttgaagaccacggatatagcctaccttctaatttctcaaaaagagaaactgagaccaagaaaggcaaaatggcttctccaaaattatataaccaactgttactgagctgaaattagtttcctgtttcccaagacagtacttttcctcatcccagactcatctcaatttcagagtttactgcagcctccctccagcaacctttcctctctatttcaggcaaccagagcaagccaggttgggactgagccacccaaagccatttgtcagtgccagtctcccactgggcaatgctaaccccagcatctggtcctggtttctagcacttacgctgtcgtgattaaagagttgacatatgtaaacaaaccataacttaagcacaacatggtcagtgagtagagcccaaacgtggatgagtgctgactcataagttaagaaggagccagtttagaaatttctagtcttgtttttctcttgtgacaggtatataaatattgcaattgctacagacagcttttttttgtgctttacattgatttttattttattattatttttttctttccaatgtttaggttcaggggtacatgtgcaggtttgttacatgggtttattgtgtgttgtgggggtttagtgtacaggttgtttcatcatacatatatatatgtgtgtgtgtgtatatatatatatcctatagatatatatatcctattttatacatatatatcctgtaagtctgtacctctagagaaccctaatacaatgtgatataccacataaacagaattaaaaacaaaaatcacatgatcatctcaatagatgcagaaacagcatttgataaaatgcagcatccctttatgattaaaactctcaccaaactctctggtaccaagcctagtacccaatagatagttttttgatcttcaccatccttccaccctccacactcaagtaggccccatgtctattgttcccttttgtgtgtccatgtgtatttaatgtttagctctcacttataagtgagaatatgtggtattaggttttctgttctagcgtgagtttgcttaggataacggcctccagctccttccatgttgctgcaaaggacatgatttcattctttttttatggctgcatactatttaatagtacatatgtatcacattttctttatccagtccactgttgctggacatctaggttcattctatttaacctttgctattgtgaatagtgctacaatgagcacacatgtgcatgtggccttatggtagaacaatttatattcctgtgagaatatatataataatgggattgttgggttgaataaagttctattttaagttctttgagaaacccacaaattgctttccacagacagcttcttgtaattcttacgctcaaatatttcttaaccccatagcaagtttaacaaaatgtattctaccccattttgactaagtaggactttttgagggccagtaggctggagttactttcagatttgaatcaggtcttgattactcagtgggacatgccagggccagcatggtgagaaaactctttgggactcttttcaggtcaccaaaataatcttatttgctgagagtgtacataattttactggctctcttcttgggacagacaccattttgtgtggccacactcagacaatatgtgacacaagattgaaagatccacagcaacatcagcagcataatctgagagatgtgctgttttcctctgttgctgaaatctggttgcgttattttgtttgactaacaagttgtatttcccactttgtgaaacaagctagagcctcgccattcaaattgtggtcaagtgcattagcagaacctgggaattggttagataggtagactcccaagcttcatagaatcagactcactcaatcagaatctgcattttaacaagatgcccagttgatctgtaagcacattaaatttgagaagcactgatctagagataaagaccatgatcctctggcttcaccatgagctccatctataaaatttcagttagtggaccacgttggttttggacagttaaatagagaagaaaaacaaatccaaagcttccttaaagtgaattctctttttgccccagcaggtttatcactttcatcttttcctttaagagctgttggagaatgataatgtttgatgttgtaccaccattcaaatctcatcttgaattgtaatcccataatccccatgtgacatgggagggacccagtgggaggtaattgaatcgtggaggtcttttccacccatgctgttctcatgatagtgagtgagttctcatgagatctgatggttttataaggggcctcccccttcacccagcactcattctctctcctgctgccctgtgaagaagtgcctggtgccatgattgtaagtttcccgaggcctccccagccatgtggaactgtgaatcaattaaacctcttttccttataaattacttagtcacaggcagttctttatagcagcatgaaaatgaactaatatagagaataatttttttgaatcaccaatgaggacttgaaggaggttatacatcgtggattgttatagctgctagtatatatgttggctttaaattaagagtcattttggctaggcacagtgactcatgcctggaatcccagcactttggaaggctgaggcagatgtatcatatgaggtcaagagttctagaccagtctggccaacatctactaaaaatacaaaaattggccaggtgtagtggtgcatgcctgtagtcccagatacttgggaggcttgaggcacaagaatcacttgaacccaggaggtggaggttgtagtaagctgagatggcaccactgcactccagcctgggtgacagagtgagactctgtttcggaaaaaaaaaaaaaaaaaaaaaaggagtctctccttcatttctagacattcagttggccaccaaggccttttgattttacctcctaaattgttttctaaactgagtactcccttttgttcccactgctgtactttagagctcatcctttcacctataaagtggatattaaaacagtctttcaactgcatgacaggcctccctatgtcatgttctcctctcatctagtgtgtcttccaatctgttgtcagaatattctcaaaggcagctctgatcatattgaagtccaccaatggtatctgataaagtcaacacctacaagtatgttatgcaaggtctttggtcatgttggttttttctacctgcccaatcccatttcttctactttcctacttttattccaacctcccaacatacactccatgccttcccctttgcccaggcagcctctctgctgggatttctcctttttctctctcttccagataaacctcttcttctaagatcatgtcatgctttttatgtgacgctcttcttgaccatgactctctaccactaaggtagagttgaccatcctcagagcctgatagcacttcatacttgctctataagcagtgctttcactgaactgaagtgttggtaaatgtgtctattgttgtactagtctagaagaacttagggccgggaaccatgtcatatctttcttttttttttttttttgtatcttgagtatcaagtaccattgctaacatatagtatattaactctcaataaatattgatgaattaaataactaaatgaatatagtcattgtgcaaaatagctatcccattgtccctgggaactgtgaaaactatgcagcctccacaggtctaggaactattttcaaaggatgaatctttcaatttctccaataatggatattaaggaattggactgacgttaacagtaaaaattacctacatgagctctgccactaccataaaggaaaacaatcctatctcaaatcctgtatcaaacaccagatcacctgtgacatctagtgaagagcagaattatagcctaaggcacaaccatgttgtgccctaccttccagtgacttggactgttaaagtgaacaccagccactctgccagatggtcctagaactctttctcttggagcctgatgttgttgtcaagaggggaaaaagacaaggggccagattaggtggagagaacagatctaaaaattggtcttggcctctgctcctccatatccccacagtggcgttcactgaatcctctgattcaagcttagttcagagggtctccacaaatgattggggccttgatcaggaaagaattcaagagccccagcccaacattctttctcagaggtcaagctacacttgcaccctacctcctacctcatattccccttccctgttcttgaggcccagaacctaccttatactccagtttctgttgatgaaagcagtaataataataatgtgatttcacattaatgcaaccttactatttgccaggtaccattctgggtgctgtacacgtatttacaagtttaatcaccacaacatattgccttactaggcactgaattatacacattttacagatgaggaagacaaaggcacacaaaagctttgtaagttgtctactttttggtttctcctcattacgttgtgcctaattactgcatactccatgatgctgactgctgtggactgtcttaccctttcgatattatgccttgaacacttgcggttagacctgcacacccatgtccgcttccccctttcccctgccacctcctgtcccctgccaccaactattacagatctacctgcttatcccagccctgtcctgaataggaaaggaaaagatagactaaagctcatttattctctactctattaatatgggtgcttaattaatgctgatagaagaattaaactcagtaatatgagtaaaaggcctagtggtgacaggcatccatggtctataatatctgaattaaggctgaggaaagacaaggcactatttgaaagaatgtgtcattttgtagtattctcttagacatgcagattccataaactctccttataataaaacacagggcgtccattaacaaactgaagtatctacatagaacaagaaacaaaccgtcactgctccattacctgggagagagaatccatggaaacaccagactcaggattttatttgtccctaacgagccttttcgatgaacttcacactcacttactctcacatttgcatagttcagataataacagctctctatttcattctcagtgttgaggtcaatgtcagaaaaagctgttttagcaacgattcccctttgcagtgagttctgggatcaggtagaacagacaacttgaagtgggaactgaaaccatctattgtgctgtgcttggagttctaaagcagattgcacttccagacacacatatggtaattttagagtcctctggagaactttgagaaacatagattagatttcattatcctactccatccctttaaatcagaatttcccaagtgtgacctgggtatctatctatatatatatttatgtatggatatatagacagctatatatagagagagctatatatatatatatatatagctagaatacgtatactgcacattgttgttaatgtaaataaattcttccagaatgataatataaggttgagtatgaaagaattaccatcttggaagagcaagaacattaatagcatatatattctactccaataatatcaggaaatgtaaatgagatactaataaactaaaccaaaagaattaggaacaagggagtgtccttaaataccaaagaattctgatcatgttgaaatgggttcttcaaaacctcataaatgatgactgcccctcagagatacttaatttgaaaacagaggggagaagtgaatgtttagctgacccctaccttagagaaacatgtattaaaaattcctagctaataagagattaggtagaaattaggagaatgaagatgggtttgagagaagattcctggcaggattttttattgtagttcattgactatctggtacattgaaatagtaatatataatttgcaaatacttgataaacataatttgcagaagaacaagttctactatctactctataaaaataagctgatctctggactagaagtttccaagcccacgaaggtgaattttcagaagtcacaacattggtcagattttcctcccatttcctgtcaacttctgccccaatgttggtgacagcggttgcctgaatcgaagacatcatccaagacaaagcttttatgtgatgcaatgtgcaggtcttacacaagcaggacccacaaggaactgcaggagctttgggtcctttttaaccaagacaggtcattaaaagaaatgaaaagatgtcttctggaggcttaattaagaaagttaattctaggccccatcatagccccattaacctttctctgttcctaaaatatcttatgtaatgtcaaaaagaagcaaggatgggaaaaggagcagtgtaattaaacctacttaaccttaaaatggaaatgtgtcaagggatagaagcaattggtatgaagctcctaacctgtatttatgaccccaaaacccagaacccataagcctcattttgctatgctcttctcacattttctttgctatggtgttggacaatttagcctgctaatttacttagcatgtctgacctgaaccatgagaagtcagttctgaaaaatgctggaagggcagcactgtcctggtacagggaacaaataaattgctggtttctataaagatttcttgtcgcatggaatatttctcaagattttcaaagtgatggttttccctgacccagaaacacctgagcaccgacttccctctcctcggtcctgtgagaatgtggcctggctggggttgagtttggttaagatccaggagaacctgatggatgtattttcttcaataaaagcacattgttggccaggtgcggtggctcacgcctgtaatcccagcattttgggaggccgaggcgggtggatcacgaggtcaggagatcgagaccatcctggctcacacagtgaaacaccatctgtactaaaaatacaaaaaacattagccgggcatggtggcacacacctgtcatcccagctacccgggaggctgaggcaggagaatcacttgaacccaggaggcagaggttgcagtgagccgagatggttccattgcactccagcctgggtgacagagcgagactccatctcaaaaataaacgaacaaaagcacattgttgttaatgtagataaattcttccagaatgataacataaggttgagtatgaaagggaggggcatagcaaaaatttagctgccttgtcaactccagcagaaccttgtgaagggagtgtgaccagcaggttccttccctagtagggaaccatcgcagggccagggaaccatctggttgcagttgtttccgttctgcttagtcacctcatttcctccaagttctgtgtcccaggctatatcagttagaaagagagcattttccaccaatctaaaactgatcagaaatgctgcaagttcccaaaattaacataagcaatcaagtctctattaaatataagtaaattatgcacacttcagataattcatgatgactctatgtcccccaggagcctctcagtgcaacttcttatattggggttgacataaaatacaggatatctttatttttatttgaaaaatctggcaaccctatttgatatccaatgggcaatcatcacccatcaccataagacagagagaacttggagccagccctggtatctcattttacatatgaggaaatagagacctggagctttctttttgatgggggtggaaaggctgcttgtacttaagtctcacagctagtgaggggcagcatatggaccagaagccagctcgatttctacgcattttgtttccactgcttatgctgcttctctaataaatgcacattttttcaaattgttgtcatattaactaggctttccaaaatctttcgaaaaacctgacatttgttgagcataaccctgttcaggcctctatgctaaatgttgtgcacaaaccaaaagaagtaacatgatctccctgacctttagcgcttttatagttttattcagtttaaatgctaaagaaaataaaaattaagaaaagttttaatactggaaaatggccaaagaatacttttttcaagcccaaatataaagatattctttttaatgaactatttaaaattaattaagccattgtcttcttccatcaatgttaataatccatgctggcattccaggcaaagggtaaaaaatacagtgaggctttagccaattgttagatcactcagctctacagaatctgttgtggaagtttattccactttccatttaactccagctggaacatccctcataccttcagtcactatccatccagaaccttctttgtacactttttccagtagaagacatgatatgaaaatttgacatgtacataagtctttcactcactcatgaagagctgaacagtaaaacagcattggcaatattcaaggtatacgcaatggagggggagcttcatcttttcattcatttttgggctgggcctggtggctcagcttgtaatcccagcactttgagaggccaaagcgagaggattgcttgaggccaggagttccaaagattaggaactcttggttgaccactaggttagataccaacctagtcaacatagcgagactctgtctctacaaaatttggaaacaaaaaaatttaggccatggtggtgcatacctgtagtttcaactacttgagaggctaaagtgggaagatcacctgagcccaggagttcaaggctacagtgagctatgaccacaccagggcactctagccttggcaacggagagatcttgtttcaaaaaagaaagataaacttgttcctctctagccatctcatgctacgtgaactctatatgtgcttgtgcctttcttatttaaaacaatattttttcaggtctttctcaggaataattgattttgcacctgtttataaaatatggtcttggactttgtaataataggcatcacatactaatataaatgaatccagtctagctaggacttttacaatgataatattaatccacttggaaattcaactgttttttatgcctttaaataaaagatttatattttcagatgatcagactgaatggtgtccccccaactccagcaattcatatgttgaagtcctacccccaatgtgattatctttggagacagggccttttaaaaaggcaatgaagcttaaatgaagtcataatggtatggtcctaatctgataaaactgtgtccttataagaagggaaatgacaacaaggatgtgtgtggatagaaggacaagcatgtgaggacacactaagataatggttgcctgaaagccaaggagagaggttgcataggaatccaaccctgccagcaccttgatcatggacttgagcccccagaactgtgaaaaacttaatttctgttatttataccattcatctgtggtactctgttatggcaactctagcaggctaatataatcagagtaacttttataagcattagccaaataattattagagtaccacatgaatgtaagcaagaattctatcttgttcactgcaatattcacaacatgtaagacagtgcctagtacatagttggtactgagtaaatagctagcaaaagattaatgaatgaattatcccccataagctgtattatccatacaatgtaaccacagtgtgagattgggaaaactgagcctttggggtctgacacactggttttatcctcagtccctttagtccctggaccttggggaagtttccttatctttctgggccttggtttctcatctataaattggcaatggtaatgttttcatcattagttattgcaacgattaattggggtaatgtgcctgcacatataaagtgatagctgctatggtgttgatgcaaatggtggggagcttcattttttcattcatttattcactcaccaactatctattgaaccccttctatgcacctagcattgttcctgacattgaggataaaaaataggtaagaagacagtctgttagctcatgtgcactttacattcaagaagatggagtcaaaaataacaagaaacaataaaataatttcagaagatggtaattgtcacaaagaaaataaagcagagtaatgtgatgatgactgtgggtgacagtgtctgtgtaagggagcagaggcaagaagtctctttgagaagatgacaggtgaggctgagtctcaaatgagaagtcagtcggcctagaaggtgtctggggaagagcactctagagagtatagctggtacacaagtcctaaggggggaatgactttagcacattcagggggcagaacgaaggccggtgtggctgtagtgttgtgagcaaagaggagagaggtacaagatgaggtccaaaatattagttggagccaaatcatgtgaagacttacaggctagggcaatgggtttggactttttataaatgcaatgggaataattgtagggttgaaggaggggagtgccatgatgagatttatattaaaaacaatgttctgctgctatgaagatggatggcagaaaggcatgagtggaagcagaaagctggtcaggagtcctgcctagtagcccaggagagagagcatcggcttggaccaaggtggtgtagagatggacagtggatgaattcagttgctatggcagcaagtggacagtcccttgatcgattggatgtgaggaaaaaaagaatgagagggtctgggatgacttttggggtctcagcttaaggaactgggtgggatggtgccctctgttgtgatcctttgtgggttgggggaggtagagagaatcaacagagatgacattaaccctaactttgtgtctaccattgagttgatgcagcaaccttcttggcatagccagcagaagcctgtcccctgagaaaaatcactggtgattgatcatcaacatttcagattagttattgactcattaatcattgctgagaatcacactttaaacggttgtgtgaaaaatgatctgggtgaatcttaagtttttcactggactcctattctaggctttggttttctttgctacggaatgaggttttcttgagtgtttattttttaagacacttcccaactgagccacatcatgtaccctcactataaaaaagcaaaaccagagcagaagcatctcctaagagctacaaggatgggaaaatagaccctggccaaaacgtggacattctgtaccttgtgcagagtttagatttcttgctctcccttattctgctcttgccactcttcctttctctctcaggtatcgtcttcttcacttagggctcatatggctgccattggctggctttaattagtctggggtactgagcatcattaccatgttggtggtgttaaatttcaatatactcaaataccatgagctgaagtcacagctcatgacaactacaggaagctagccttgaactaagctgggagataattaaaacaggcaggagcagagattgttcatacagacctctcctgcactccgacccaaccagcctcttttggtgtcttatctttcttcctttgtcttattcactttctctccagtaaaggttattctaaagtgggcatctaacaatgatgacaatgttgtgagcaagaaaagagagcaagtagaaatacgaaatgtttgtcctgagaagctgcctctgatgggtttaaaatcactgtggaataaaaccagaatgaattgttccgagcagtaccaagtgtgccttttaggcccaaatacttctgtagtccttctattgtgtctacatgagggtgagcagtttctttttccattgtactaaaaagaaagaagacagacacaaatagtagctaacccaaaatcagatagatagctttggaatttacttaggcaaaaagcattcatcataggcagtcagcagatatgctatttgtcacttaacccgaaacccacccacccctaaccctcactgtcactgggcccaaagtaaagtgtaaagatttttttttctttttttagatagagtctcgctctgtcacccaggctggagtgcagtgatgtgatcttggttcattgcagcctccgtctcctgggttcaagcaactctcctgcctcagcttcccagctagctgggattacaggtgcgcaccaccacgcccggctgatttttgtatttttagtagaaatgggctttcactatgttggccaggctgacctcgaactcctgacctcaggtggcctcccaaagtggtggcattacaggcgtgagctaccacgtccagccaggtgcaaagaattttgattggttaacagaaagcttgcctctatgcggtttggatacataattagccttgttacaaattgaggtaagactggattctaggagatgctatcatgggagctatagatacaaacaagcaagtaaatggcttagtatctaaccccagagaagagatatttgggaaacaagcctgaactacatggactacccccacttccaggtttaagtcattttaggcaaaaataagctctaagaagaaaatcaagcagatgtggtgatagagaagaaataagaggcaggagtggcctctctgagaaggttaaatttaaactgaagcatgaaaaatgaggagcagccaggctcagagccagacagggaaagaaaacaacaggtgcaaagctcccggggtgggaaagagcgtggagtgtcgtagaaactgtcacagagccagggagggctgggtaatagtgacaaggggcacaggaacggggaatgaggttggagagctaaacaggtgggcagaagccagattccatgtggtgtttaaggcagagtaaggagtttaaatattttctatgtagaattggaagtcattaaaaggtttaagcagggaaaagacatgaactggttttgttttgtgttttaaagatcactctagctactctctgatgaatggattgttgggatggggttgcagcagagagatcagcgaggcagccactgcaataagatgggcagtagataagatgacttgggttgggatggtagcaagaggagaccaggagaataaaacagcttaaggtgcattttagatgtagaatcaacaggacttgctcatagactgaataacaggaatgaaggaagggcagaaattaagggcaactcccaagtttctggcctgagcccacaggtgggtgaagaggccccttttctttgggggtaatgccaggaaggatgaaggttgggtgcaatgagaaagagtttaggagcaggagaaaatcaagagttctatgttggacatctcaatactgggattcttatgcggcatctaattaaaggcctcatctatcattacttacacagttaagtacatgaatccggagctcagacgagagggcaggggtgaagatatgaatgttggggcatcgtcatagtgatggcatgtacgtcactgcgttaggtgagctcacccagggagagagtggagacagagccaagaggataaccccgaggtgatacaggaggagactcgccttcatgacaggaagaaagggtgattcaaggcaaagggtgattcacccaacccaaggtgaatggacccaaaaagagagaaacagccaaagagaatgtggtcccaccccagagcctagtgcctaccaaggaaaccacagtggggccctgtgaagattaaataaataatgcataggaaagcgtctagtgaactacaacttattatacaataggtggtaaaaggattactatctcatctttgatttttgtatgtgtttactgctcttccccttactaaggggcaaacacataaaggcaaagatgccacttcattcactccttttgttctctagcacctagaacaagtaaatgtttattggctgatgggtcaattgttgttttgaccatgcctaggagaattactctccaatgcctgcttcaggttggcttctgatagaccattcttgctgcttcctgcaacttcgtacttgcaagacacacattagaactctttaatcctgaggaaagcatgcagcagaatctccttctttccaatcgataggaacagaatagatgctcatctgttcaggatggatttttttccccctttagctttgccaagaaaattcaaaatcacacacaagagtgggagaactcatttgaactaaaaggaaacaagggtttaactgaaactcttgtaagagatctggacttcagcatatttctcggcagggaacatcaataaggtaggccatcaatcagagcagagcaaatgctactggagaactttgcgagaggaaaaaaaataaattttcttactttttcctccatcaagttgttcttgtctatttttcaaagaagctttccttttctcctgctaaagccaaatacagcctcaagaaaaaaaaaaaaattacagatcttctcgcttatgttagaaatccccccttccttctcgcaggacttctaaactttcttcttcacctaactgcctttcaggaaatctgaggcaaaaaagagattaatctgtattgtaaaaggtgagaaggtttagaggttaagccgtctcagcagacaatagtagaatgcactttcaaaacacattctgagacgatgcataccaccctccttacatcaaaaataaaactccatgagaatagccaacatctaaaaggcctagaagtggaactacaaatgatattaacatggcatatatggaagccgtccagacttcacaatcaaaaggaattggcttctaatcctgatttgctggctgtgaaaccttggacaaattatttctctgtatccttttcttcattttacaaatggattgatatcgcttaccttgtatagtttttgtgaggtttagatacaaagcacaaagagttggtactccacatggcagaatatacgggttgggagacagacgcaaatgtctacttgctactctgctgtggctgtaaggacacatgggaaactggtgtacagtaataacagcaaacaatatttttgagctcttgctttgtgttagacactgtttgaaagcgatacaatcataaaatttaagacattttcttgaagttgctcaataggaagtggtgaaactggatttcatatccagacatttggactccagagtgccttctcttcctactaataatatacaatttcataggtatatcaaatatatatacatatagaaacagggcacttggattctagtttgcatttcccacaaatttagttgtttggcccttgggaaagtcatctaattcttctgactctcagtcttctcaatttaaaatgaggagagtggctgggcacggtggctcattcctgtaatcccagcactttgggagaccaagacagacagatcttttaaggtcaggagtttgagaccagcctggccaacatggtgaaaccccatctctactaaaaatacaaaaattggctgggcatggtggcacatgcctgtaatcccagctacttgggaggctgaggcaggaggatagcttgaacctggtaggcggagcttgcagtgagctaagatcatgccactgcactccagcctgtgggacagagccagactctatctcaaaataaaataaaataggaacagtgggacagtagacacttttggatcactcaggttgtgactcttctacaatcatgaagtcctgtgattttatgcttgttttaatcaactatggacttccagcttttcaaaacaggccaatcccttggctgacagaacagaaaccatgaaagtctgcaaagatgaaccaaggttttgcacatctcaagtgggctgaaaactattggttctattttgaacccacagaaatggaaggaattggcatttttttcagaaagaacaatgagaaattccacagtccttctctatctcacagtcttggtagagtttcctgccataatcaaacatgaaatattttatattatagatgacaagaaacagcaactgacccaaggaggtaagggcaggcctagaaagcagtggaagccacaatcacagctcactgtgatgaccacgtattacagtactcattgcacctgtggcaaaacagggcccataccacctagaaaacagcacggtcatgtggaaaaccagggctggaagccaaatgtctgacactcgcatgctgagctcttcttttgacttttctgtttcatagcatcagtaggaaacaaagagcagattttcctgatccaacatgattaggtatcaaattttcagatatagaatgatggtgttcccctgcctaaacggcaatgattaagttccatctgaaatggctgacagaagccctgtcgtggcttcagtctaaattgttgaagcatcagaattatatggtgcttttattatcttgtggaatgcatgtccctggggtacttctttgagttcaactaaaacgacagtttaattctcagtaaatgagtgctaattaaaatgctgggggaaagactgtcataattgaataatgagaataatgcagaatacatttgtttaaaggttcctgtaagctgaatttcaggatcagaaaatggtctttaggagctcacaggcaaaaccaactctgaaaaacctttaatactcagcatgggtattcactaagttaagtctccaccctgagtaggaattgttttaaagctgctgtaagagtctaaatctttccttcacgttttatttcttgcaaatgtttgtgaacgtgttccttgctcttagattttgtgaaatgtaggctagagtagaacttatagcactgaaatccatttctgctttactcttagacaggtagccatgatggcatctctggagccaagtctctagaatgcaatagtctttgacataatagtgcttttgcaaagctggagaattagacaatgccaaaattagaaagtgtttggaaggaagcaatgtgaagttagtgggaagaacatcagattctaatcttagctttgccaataattctaaaacaggatataaataatctatcctggatccttatcatttagttaaacctgtttggagggtaaaatgagataatgcacttaaaaataattctaaaagaaaaaaattataaaatgaaataaaactttatctcaacaattggttgacttagtataaatttatttaacaattggttgactttggtataaatacaggttgagaatccaaaatcttaaatattccaaattctgaaactttttgagtgccaacaaggtgccacaagtggagaattccacacctgacttcaggtgatgagtcacagtcaaaactttttttcatgcacatagttatttaaaatattgtataaaattacctttaggctatgtgtataaggtgtatgtgaaataaatgaattttcatatttagatttgggtcccatcccaaaatatctcattacgtatgtaaatattacaaaatctgaaaaagatttcaaatttgaaacacttctggtcccaaccatttcagataagggatactcaaactgtaacataaacctcatatttattttcctaattcagatgagtctggtattaatatatttaacagggtaggtctgtaatggccaagctcattacagtagtatattattagggaaatctgtattatcctaaaatacaaaatgtatccttaatcccacacgatgttcaatttatatactaacccccaccctcagctgctgagataattggattgactttcatgcttctcagtttctacgtttcctttagctcttccatcctagtaatagttaatttcaaaggctttaggattttattgaatgcaatctattcagtgagtttctgtcctgtccttaaagatctatgggaaaaataaattctataacctccttctacgcctaacaacttttacagtgagtaaattctgtacaatctgaattccttgattgtgaaaaaatgtccccagggccacccattgggaggcctcccatacacttactaatccaacacagcttagaggccttgacagctccagcggtgctgcttagacaccccccttatgaatatgcaaagacaatctttcacttacaaaagaaactgatatagccattatggcctgtggttaatcaaacctccattcacttccctctgctttgagaaccgtcatcaagaaaatgtgttgctaagcaaacttagcagtaaggacctggttcccgtataaatgactgcctagagggcagcttgcttagaagtaagaatccaggtttttttcagcttctaatttgatttcctgtaaaattcaagctcatcattcagtttaaggaagatttgaaagttgctcacacatttatcatttaaacaagttcgagtttacacacacacagacacacatgcacatgcatgcacatgcacacagacacacacacacttcctcataccaggtcctccctcttgcttctgcaattgtttttttggaaaacctccaagcttaagccaaggaaatgcataatagagaagctgctgactttccaagcatctggtgaattcacaactttcactgagccttacataatatatcatcaatattcattctttcatagacatatatcttagtcattcccacctcccccaggaaacttggtcaagggaaaacataaaggacgtttcatagcaaattcttaatagagagtacacatgagtagaaatataccctgctttgcaactaactttcggtgtaaccttaaaagatcacttaaggccaggtgcggtggctcacgcctgtaatcccagcactttggcaggccgaggcaggcagatcacaaggtcaggagatcaagaccatcctggctaacatggtgaaacccccatctctactaaaaatacaaaaaattaactgagcgtggtggtgggcgcctgtagtcccagctactcgggaggctggggcaggagaacggcatgaatccaggaggcagagcttgcagtgagccgagatcataccactgcactccagcctggatgacagagcgagactccatctcaaaaaaaaaaaaaagattacttaaaataattggtgccatggattccatagtcccaaaatggagaacaatatactttctatggtaccaagataaggccttaagcctgctcacacaaatagtttaacgtatttcataaatgacctggattatcacattctgtcttggttagccaaaacttgttttataggatttaggcactaattttttccagtgggtggtaaaccagtggtctcaattctccattctatgcaaaaattttagtttaccacttggaaaagaattcaaagagatgagataagacccaggcagcatagaactggattgtggtattaagtaatcaaatctaagctaccaaatttattttagaaaaatgctttattagatggtggatgtagattgcaggttatgtcatacaacattcacatttaattgctttatgccaaataaccttgcttttgccatttcttaaggtatttgcatataataaacatgattagagaatattgtgttattctgcattttcctagattctgtatttgtctatttggcatccattcagcacagggccaattatatttgctacgtttttaaattttctatattcttgatgttacggcatttgagggtcttacatacccaaaaagagactgtcccttccagggttagctaattcctaaagatagtaaacaagttacttgagtgcatgtctctcatatgcaagccgaccaccccctttatctaactctcacatacaaagccaatatttcttctgccctaaatcatcccaggaccagtgctatgatttgggtgtggtttgttcctgccaaaactcatgttgaaatttgattcccagtgtggcagtgttgagaggtcgggcctggtaggaggtgtttgggtcagtggggtggatccctcatgaacagatcaatgtccttctgagaaggtgagggagttctcactcttgctaataggttagttcccatgagaacaggttgttaaaaagggtctagcttcttctcctgccatgtgatctctgcacatactctccctccttccactttccaccatgagttgaagaagcatgaggctctcatgagatgcagctgcccaaccttgaaatttccagccaccagaatcatgagccaaatagatctcttttctttataaattataaatgacccagcctccggtattctgttatagcaacattaaaatgacaaagacagccagatactaggcatctaaggactacccctatagcccgaagccctctagaattttattcaaactagccagtccaaaactgcttactctgccctgccttgcctttcctttggaaaccccataaagagaggctttggcttagattctcctctctccactttctgccttgtgaccaatactcgtgctccccatgtgcacttgtgtagcatgacatggcccttctctgggaatgcaagggagaaaaatgttctttccatggcatgagcttccccatgtcaccacttggtaatctccataaattaaaaccccgtgggcacaaatgagacacatgtctgccctcagtttagtttgttatggtattaatgttatttgatataggataagtgatatggtttggctctgtgtccccacccaaacctcatctcaaattataatcaccacgtgtcaagggaggaaagagattagattatgggggtgatttcctccatgctgttctcatgatagtgagtgaattctcacgagatctgatggttttataaatatggtcgtttttcttgcactcattctctctcttgcctgctaccatgcaagatgtgcctttgcttctccttcaccttccaccatggctgtaagttttctgaggcttccccagtcattcagaactgagagtcaattaaaactccttcctttataaattacccagtcttgggtatttctttataacagtgtgagaacggactaatacaatgagaggtagcaacaagtaaattgccctctaaagacttaagctccactcaaccctgaacttcttgattacagaaacggtgtaattatttatctcactgtgtctcctggacacagtgcttggcacatgtgaagttccaattagttttcacagaataaatacattggaaatggctaaattaatattttccattagtgtgatggtgaccatagatcaatggtccagaatcatctgagcacttgtgcaaagatgagattctgaagccctactcgatgctttctgaatcctaatctctctttatgaggctgagggatctgccatttaaacaaactccaaggcagttcttggttacattttggtaagagaatctctgctttgctttcttgtctcaaaagcatcattcttggctttaatggaactcttcagtcaagatgaagcacataatgattctaaaatatgaggaactcttattccaaacacttactattcatatgtagtttgaggacctatatttttgatattccaaaaacctatcaacaatgccaatatgtggatgactatttggtgctcaatccatctctgacatcagatgcatgaaatcagtttctcctatatctgttttgccttctaattaatatgaattgattggttaagtttttccaatatggaaactaacagacttttgagtcaaataatatgtgcatgtgtgtgtgtgtgtgtgtgtgtgtgtgtgtgtgcttgcatacatgttaacatgtgtttaaatgctttacttttgttttactttattcaattcattcattagcttgcaaccagtcaagtgtgacttcttaatagtgtgggttatgtatactccttcaatcaactcttggcatcttatgccctcatcttcttctcagaacacttgtatgagacctctgcctgctttggctacatcttatagaaaaggttctctgagggcacttgtggatttttttttttattcagtcatgagaaaacacatgaaagtacattctaatgaatattcaggtccacattcctgaaaaatatgctcctcaggggcgccatggcatagctttgtgaaggagctcttctctaataacagttgatatgaatcaaggtctcagccaagccttcagtgaagttttccatccaaccttttctcttagaattgacgattctggcacttctgtcaacattgtgcctacagcttctgtgacatgactgaaactcctcaagggcagtaagtgatggcatgtctttttttcctttcatctcaccttctgtctctctcaaaggcatcaggaaaaatctgagataagatgcttacttctacacaggcgacaatgcagccacatgaataagtaattaagtataagtcagtttctcagacctcaaagggccagaatgttagaatggaagagggtgagagatacacactgagtgtccccctggcaaatctgtggggcgctcagcttctctaagcccatctctgggcccctggcagttcacatttttgtcctaaagggctgagcttcccctctgatgctgctaatcatgtctctcctctgtttcatgaccgaaattctggctgccctggaactcatggatctcatttgctgatcaccactattgttggcctgttctctcttatgagtcccctaatgctgcagttacattgatccttacagagtttggactacatcaaaattttcaaggtacaagattgggatggaaaaggaagaaaagaggtagaagaagggctcttccttccctagcattttgatggcttcatgaagtccaaacaaaatggcactattcttttaaggcctttaattgtgtccctggtgtgaataatatttcatttgatttgatttttcagtgactttcatgaaattctgtccttcaaagaacaacaaataaaacacttgccactaattatctgtgactgcatcagacaacaatgtgaatgtgaccacatttaagaccaaagctctttgctctccaacaaccagaagccctggacaaggagagtgcagtgactatcccacttctagttgtcctactcctagggctagctatcaagactacagctctagcctgtccacttattgttcctctttctatgagacccagaggaaatgataatttagcaaccttcacagttaagcccacgtgccctagagcagctaccttcaaatcctttgtcatgtaagacttagccagattctgccacagagatgaaggtgaaccccctccagccatccagtaatattgccaattaaatcagataaaccaaattgcatctagtagatatctctaactcaactggctctagggaaatagtgactgccagcaggtggttcagagcaactctttgtaatactcatttcctgttgcttaaagatgtgaaaaagaccaagtctaccagcttctggtgtttgacaaaccaagctcctgttggatcatatttgaacagacagctgtatctgagtgtgccagggaaagccttcccagacaatcaagtaaggtcagcaaaaattccccagactagctaagaattggtaatcacctaatcccatgaaaacatagtggcaagctatgcgcactgttggcttttttgtacacgtttgttcatttacccatcactcattcactagccagtcatccagctctaatatgcacccatctctgtcctaggtgctgggcacacactgtcccggccaacgcaaagcctacaggctagtggccaataatgaccacgcctgtattttctcatacatcaatcggaacctttcctgaaaaaaacttacaggatgcaattcttactaataaaacaagattgtcagcaatgcttaatttaattatttaattttgtaaccgcaaaataaagtggcagaataaatgaagtatttataccctggatcaaagtcaaatagaagttcctgtctaacccaggaatagatttcaagttgcctaatgtctaatctggttttctcactaatcatcacttcatccctttgcaagagaaaacctataaaaagtgtaacagtcccatggctagaaaaatatgtaacttagattatgcctagaaataaaacaaacaagcaaataaaaccccaataagacacaaccatataaaaggccaattcttgctttctggataatatctgaaccaggcaatgagagcaaaaacatctgaattctgaattagctgtcataagagtgtcttctttttcccagtcttcatctattcccactgaatatgagttcatacatcttcttctgtagttagccaatggaagccttcccattactcactggcatgtaattcttaatagcttatttacttactgatttggaatgtatcatattataaataacaaaatagaagggaacgggggtaagaagcttttacattaagcatgataagagaagtgcacgttgataacgtgggaagaagaagaactggcattaggcatacagctattctcaggagttaatgttcataacaatactgggtgttcatcctgctgataccgtcttgcttgactaaagaaataactgaaatccaagagaaattgagttttaagaagataacaatatctatgctacacttttgatagatttccatcaacgaataatttagtaacattcacttacgcatgaatttccaaatagtactttactctagaatggcagcttgtacagtttctcagacatgtgttcaacccattgatcttcatagcaaccctgtgaggcacatagatattcatttatttattcattgtttgttcatttgttttcactattttttcatttgccttctcatttattctgccagtcaataagtatttgttgatttcttccccattgtgggcactgtgctacactattatcctggactgtccagtatggtagccccaagccacatgcggctattgaaattaattaaaactaaatgagattttaaattcagttattcaatcacactagacacattttaagtactccaaaaccacttgtggttaaaggttaccttattagagtacagatacagaatatttccatcactgcagaaaattctattgaacagtactgcatattatcatccattgacaaatagagtcaccaagacttgccaagggatgccaagctgatttacatcttcttaagatttattacctctgactttggaaaagtactatccttctacctcacacttacttatacttccaagtctctatatgggagatacaggggcaagagagatgagggaggataacacacacttgttccattctagaagatgctcagcccagccactgtttcacgcctacccgtggaaggatatcctgcaacttcccttctcctgttagttatgttttgttctatcttcagcacatctcattcacctacactgcctgagccagttaagcaagtgactgtctctctccttttctcagtgatttccaagaactccacatccacaattactaacctactctaaggtaccattgcttgctttaaaattctgtctatattgttgacaactatgaaaacaatccaactccctttctcttctttgcctttacttccctttttcagatgacagagccaaggttggagaattcttccaaagaatacctcaaggcaacaaaactgtcatttcttacagaggagctgcccaatctttcaccttctgctgtgctcacctatgatgccagcccccataacaacaaaatctttctcttgaagaagagtaatgtaacttttccaggaatgctcatgtttttctctcaaccgggaaattagatattgaaaaggaacagtctttgttaccttagagttattctgaaagtttaatttctttttaagcagaaaatatagactcaaaatgcagaggaagcatttctgtatccatgcaagaaaaaaaaatgataaagaaactagagtggatatgatctaataagcatgttagggacaaaccctaaagataactcaaggattttaaaaggattaatggcaagtcatgatgattcatgccagtaatcccagcactttaggaggctgaggtggcaggatgacttgtgcccaggacttcaagaccagcctgggcaacatagtgaaacctcgtccttacgaataatttaaaaagaaaaaaattagctggtcatggtggtgtgtgcctgtggacccagctgtttgagaggctgaagtggcaggatcacttgagccagggattttaatgctgcagtgagtcatatggacttcactgcactccaacgtgagagacaaagcgagaccccatctcaaataaaacaaaataattaatgttgtttatgagaaaagaagtaatggaaatgtgaagaggtgattctgcaggccaaccagaagctatggaaaagaccaccttaagctcaaagaaaaatacagactcagttgttaccaccgaagtcttatcaaaaaccttcaccagtcacggagctttttttttttatatatatactttaagttttagggtacatgtgcacaatgtgcaggttagttacatatgtatacatgtgacatgctggtgtgctgcacccactaagtcatcatctagcattaggtatatctcccagtgctatccctcccctctcccaccaccccacaacagtcctcagagtgtgatgttccccctcctgtgtccatgtgttcccattgttcaattcccacctatgagtgagaatatgcggtgtttgattttttgttcttgcgatagtttactgagaatgatgatttccaatttcatccatgtccctacaaaggacacgaactcatcattttttatggctgcatagtattccatgctgtatatgtgccacattttcttaatccagtctatcattgctggacatttgggttggttccaagtctttgctattgtgaatagtgccacaataaacatacgcgtgcatgtgtctttatagcagcatgatttatagtcctttgggtatatacccagtaatgggatggctaggtcaaatggtatttctagtcagtaaccaaaacagcatggtactggtaccaaaacagagatatagatcaatggaacagaacagagccctcagaaataacgtcgcatatctacaactatctgatctttgacaaacctgagaaaaacaagcaatggggaaaggattccctatttaataaatggtgctgggaaaactggctagccctatgtagaaagctgaaactggatcccttccttacaccttatacaaaaatcaattcaagatggattaaacacttaaatgttagacctaaaactataaaaaccctagaagaaaacctaggcattaccattcaggacataggcacaggcaaggacttcatgtctaaaacaccaaaagcaatggcaacaaaagccaaaattgacaaatgggatctaattaaactaaagagcttctgtacagcaaaagaaactaccatcagagtgaacagggaacccacaaaatgggagaaaattttcgcaacctactcatctgacaaagggctaatatccagaatctacaatgaactcaaacaaatttacaagaaaaaaacaaacaaccccatcaaaaagtgggcaaaggacatgaacagacacttctcaaaagaagacatttatgcagccaaagaacacatgaaaaaatgctcaccgtcactggccatcagagaaatgcaaatcaaaaccacaatgagatatcatctcacaccagttagaatggcaatcattaaaaagtcataaatcaacaggtgctggagaggatgtggagaaataggaacacttttacactgttggtgggactgtaaactagtttaacccttgtggaagtcagtgtggcgattcctcagggatctagaactagaaataccatttgacccagtcacggagctttgaggaagcactgcagccttaaccaaaaaataaaactaaatacaacaagtataacaaaataaaataaataaaggttgctttgtgaaggccagtacaatgagtgaatgaagggactgttgtaatttaacacagcctttaatttaaaaaaaatttttggggtgaggacattttcccctgaatgtcaagtactggttaaacactgtggcagcacagtctgcagtgaatgagatatgagaagcgaatgagttcccattcagagggaaagatgatgacctgagtctcaaaaccaatagtggaccctggggcccccagctgcccagctccagccagctacaggtgctgaaaaccatcaagcacagggcttttctgcacctacccctgaatgaatgtaagctctaaggaaccccactgccctgaaaccccagtggatgagcccacaagaggtcattctgcccgaggtatacttcagtctacccagctaaagccttccttcctcctccctgttacccaaccactggtttccagaatactagccagttctctcctggactacagtcctattctgaacccaggtgatttgctagcgttcacagggaagctggaccctgccaggcggtgcttaacacatctggaaccaccagcctggggcgtattctcactgcttcaagagccttattataatacctcctcccatattgaccccctaaggacattgaggccagcctacattggacccaatctgccatgtccccttgatgttgtgatttgaccacatttcgacagctgtgtttatcctcctagctctggtctaagctctcctggccagctgaccactgagattctaagcaagctgtccaattttaagctgatcattgcagatccaagatgctagtatcatacaaaatcaaacatatgaatgcctgtaaagccttgtagaccaaagtaaaaaatttgtatttgattctaagtataagtaaagagttttatgcagaagagtggcataatataaggtaccttttaaaaatgcaactctggctacgacgtgaagaatagatcttaaagtggtaagagaagatgtgaggtaacaagttgggagaaaacctaatagaccagggcttacctagtgctcacatggtagttcaggtgagaaacagtgatgacttggactagggtggtagcagtggagatagacaaaaatataaggattagagatatgttttaaaggtagagttgattaacattctcatacagaaaaacaagggatgcctgcagcccttgtccatatcaagaaaacatcaatttaaactataacacacaaaaaggatttcagtaagacacaagtaagaatttcattttaatttaggactagatagcactgacatagttattcatacatagatgttggaacttttcatggtggtgggagattgctttagaatagaacaagtatccaactccctaatttaaatgaagttaattttaacagtaacttcttgcttggacatagtaaatacttttgctctaaaaattactctttcccctaaataagtttcccagtgcaacaacagaaaaccaacatactagctcaacaccgtgacttttcagaaggatttttgcaatggaattaaacacattttaaactgttttgagagactctatcaaagtttattgtctagtatgaacatattttttaaatttcacaaatgaatatgagctgttgacaaaggattctctgactacacctatggaaaaagaatcttgggtaaaataagctaagtagcctggaatacgttttgtttgttgacaatattttcaatgttataatcaattaataaacagacatggcctctattaatgctttcatttgaattcattcaactgtgtgtgtacggctcagccaatgtagagattaccttctgatatgacaatacagtttctttgctatactttatgtacagaaaaatcattcttactacttataacttcagtttttcatagaattattctctggcctaccccccgctctctttttctgtttaaattataaaccaattttataaccattaaaatgtattacacaattttatcaatgtgaaaaggtgagtcaggaaagtctaatggtagcaaataatccagcaaaacccaagactggaactgagtgatgattctgggcatcagcattagacaaagttcgctagacctgtggcccagtgtgttgacatgttccctaaccaaagtcttcaaatgtgtagttgatcacgtatgtgtaaaacgaaaacatcattgaatgggattaccaaagaaaattataaactaataaaaacggcatagacattgcagccacagtgtacgtggaattttctaaatccttcaataagagcacaggttccctgtcaatctggatagtgattctgtgtgtatacattctttagtaggaaaccatcagggcctcagggctatttattacgtgtgggcctttcccattctaacattctatcattctgtcaccttgtactgtgtcttctgaagagatacacaagaaataaaaaaaaaaaaccacccttttaccccataacaaaatgaagtagaaatcctcaaagctgtggtttgagacagatggcatggttatgtaatataagtggcaatatctccactagactgtggatttcatttgtgaaatatgtctctgaactatgactgatgattgttggattttttaaagtgccttcaataatctcgtcagtgtaatgaattatcaaatatcttggtcccagataaagcaagagccatgacaagtacaatggttagatgcatttgtattgcagagacaatcagaagttgtgcatgcatgggcttcagatcttttactgaatttgcttcaagataaaatgaaagtagtttattatcacatgaattccagaaatgaggcttaaaaaaaaactctccagcaggctcaaaagaagtaatttcaaacacaggatctactgagtttctaggttggaagcagcattcaattgctcttgtagtacctggaaagggatttacagtaccagcagcttctcacctcgctcctgaaaagattcccttctggttgctggaagatgttctgcttaagtaggcaagggtgacaaggtcttctgccggaatcacataatggagtcaaatactccaaactaaaaatccaatttgtaatagcataagctctgtgagctcaaaataacaaaaaatctctacagtgaaccatagtattcctggcatatgtaatgtctgtggtctgtgcagaggcagcaagcacaagggctgtcttgtgcttcagctctgtctacctagtacaacagatctgtgatgtttttgaggcagattatctggtaaattgatcttttttcttgtaattttcttccaattacctacctttagggagaatgaatgcaaaatcactggccttgaaatgcctttttacattttcactttagcaaatttttaaattatgatgggatacaaattccaaaacgatttggcagagatcaggaaagaggactttggtgtcatcagaaagaaacgcacctgtttgatgggggcagaggagggaattaccctggtgtcagaaatcctgagcatgttaatggtgctccattcactaactgcataactctggaaaaattctctaaacttccattgctcagttgcctcagctgcaaaaggaataatcacacatccccagcccaccccaccagactgtcagattagcgaaaggcataatccttttgcaaattgtaaccccacaattcatgaagttaaatgcctgatcaatcaattatacaattgggattttttttaacaagaggaaataggcaaaactcttccttagttgacatggaaataaaatgtctctcatcaacctttggagtcagaaaaacgaagaatcaaaaattcagagaggtaaatttgataataaagcaaataatggcagagcactcactagatgccaggcttcaacttattcatgaatcacataatttaatcctcacaggaaggctatgagggagagactcttcctttcctctccttttgcagagaagataactgaagcttggcagattcagtatttttgcccttggccacttccccagtatgtagctgagtcagcactcaaaccagggctatctgattatagaatccatgcccttaaccacagggctgattacctcctatggagctgtcagttcagaacccagctccatccagtctagcctcacactccactcatcactcagcttcagcccagtggttgtctccagctctgcattcttcctcatgctctcctttcctaaatagtctcctcggcttcactgcgttctttgcatcctcaaaggctcaccagaaaccttgtctctggcacatgccttcctaataaaattccatttcctactgatcactctctgtgttgccctgattggttaattatgtcttagatgtctcctttgcttgggtctctcatgaaagcatacatttcataatacatgccttctctctctctcccccatcccccaactaataaacgcctaagactgtactaggttaagagaaaacttcctaaataatttcttggagatattaacaaaacttttccttgtcctactcaagtccaggctggctttcccattcctcatattgtctgagggcaaatatcacacacaacaatacactgtatgcaggtgagcaagacagggtcccttcctccagtaacctgttcagtttatcggggaagacagaaaacaagcaatcctgtcaggctaagggaagtgcagattaagacagaggcacaaagtagccacagccaccccagtctatagaaccatgagaaggttatttaatgagtcaggtatttaggctgaaattttaaggattgtataatgataataacaatgaattactgaatgtgtcctctcttcttagaactttatatgtatcgcctcatttaatcctctcaataactctacaaagcagatgctattatatctccctattttactgataagaaaactcgggctaatacagaataatttacccacggttactagtatatggtagaaataaaattcaaacccaggcaggctggcttccagagaccacacctttaactggtatgctatccttcctctcaagtagatgagccactgaagtgagagagaaagattgttccagggagatggcccagggtttgcaaaggtcatgagaagaattcaagcaggatatgtagagaaactaaaggaatttaatacagggccctgacaactccagatgagtcattgggcacctgagatggacatttagccgttttccaaagagggtgtaggaaagcacctgtccctgcggggaggtttgcggttctgccacagagaggcctttgttgtacttggatcaccagggattgtgctttcctggcctcaagagccagcagagtccactccattgtgcatcaagagacaggtctctgactctcctttttaacatcagtctgtctcacccctacggaatcagagaatcctcaaagatcctctggttctagaagagaagagaactagaatggcctgttcctctgttgccaggtttccacaccatcagattccaaagaagtttccagaactcccttaacctctcattttaatgtcaaattatcctttccatgaagacagtcttacttagatctgatgtaaacccttcatgctaaaaatctagccccaatctcagctctcttttcatgtgtggcagaatagtaggtcatctcctctgaggagaccacctcaaatgcctgtgacacagccatgtcttgggcttgcagtcaccttgggcctcctggcttgaccacttgtgagctgtgatgttaggcagattactcaacctctcagtgattccatttctcgtctgtaaaatgggaacaataattgggcttatacatgaatttgttttgaggattaaaaatagataaaaggcttagcccagttgcctagttcatcataaatgcctatcaaattttagcttaaaaaagaaaagaaaaggtataattccatcttatcttgggctaatgtgcatacagattagggactaacaaataaacctctggtcaacttttcccgggagagtaaaaaagatcaaatgcctaaaagtagtaattacactttcagtcttcttattttctacaagtatgcagatgaatagaacatccacttttaaatggcaggtataaatcagttataaaagtgttaaatagatctatgaaggccaggaaaaaagaaaaaagaaagagacaggaaccatcccgctgttgccatgacaatgaggcacgttacctggacaaagattttggaaatctcttaaaagaatagccagagatgcttctgtctattttgggaaggacaaagtcttcttttatcctgcactaaagacacgcatccacttgtctgctgaatatctcccaattaacacagggcaagatctgagaggagcggggatgtcatgagcaggcaggaggtggcatggaaagggacttggcagggggctgagaggtgaaggcaaatatcagtggaaaatgcaagatcaaactgcccagaatctctattgtttcatttaaaatgcccacagaacattcattaaaaagcatcattctcacgcataaaggcccccaactgctgcagacgaagcttacacgaaatggaatcctaaaccaataacacttttatttttattaacagtggtgacatgaagaaagtgactgaaaactctggtgggcaaggctttccctgaaagtcatttttatgtgtagaggaatagagagcttaagattcatacaatgtgttttctccaccatctctttaggtgtttgtaagtagatcgtgtgtgtgtttgtgtgtgtgtgtgtgtttccctccttcaatctgtagtttacacttaacataataatcttgcacacctctctcatttttcagttaatcgatagtattttcaaagcaacaaatagaggctatttgtaatagtatttcctttaattgcatatttttcaaacatgagactattaaagtagctgtccctgaaagcagtcattcaattctcctctgaggtgccccttcattctgaaagggcctccgtaatcaagctcaatagcatctcttggctgcctgagaaaaagcactggaggaaaaaaaaaaaaagaaatctattttccagatcaaagtaatccctgctccattgccatggctccagacgtctcttttttcttttcattgaccagacaagtttcttctcagctccctgcttcattttttttttttttttgcctgaatttgttttctctttgggaaaagtggtcattaaagtattagtttaggttgattggttcttcagcaacagaagaggcttctgatgctttgttatctttgacatgatctcaaaacagttgcctgattattatacgatatggaaataataactcaaggcaactggcctccctctgagaccaatgcaggtgccaggtacaggattacacacctaatctactagtcttctcatgggtgcttttagggcctgagtgtctgaccacatccctggatgttacaggggacttcacctccctgccctagccatggaggccccgcccccacccatggacctgaattcttcccaagtggtcgagactgctcagcacttgtctccatttataccaaccagtggcgcattcagtgggaagaatgaggcggaggagagggtggctttgatgtttccaggggcaggaaatcacttggatgatcttccagggccacttggcagcaggtagagggtgtgacagctggtgggaaggtcagcggctgggatgtggccactcaaccatagcagggaactgctctgcccttgcaaactgagaagtttatttctatagtctggtggggggtagagatgagggagaaagatcagagggcctggcacataccacctgggaaaatgagaattcagaaacaatcaaataatatgccagaagagttcactacttttaaagaccaattggcccaagcccttaaatccaatctaataataatgtatgactgccagtgcacaagaggtggtacaaatggtggttagccacatcaacttcgaatccagactttaagcctctctttgctcatctgttaaaatgcagttagtaacaggcttactgtgaggattaataataataataaggcttactgcatactttgtgtcaggcactgtgcatgttacttggcatgcattatcttatttcctactcacaataactcttcggaatagataccagtactatgcccccactttcttatcagaaaacaggcatagcgagttcgttatccagagtcacacagctggtaagtgaagccagaattcacatctagtcagcccaaactctagcacctgcactattagtcattacttaggaatgaaatggaataatgtataaagtatcgattctggtaccagacactcagcacattatccatcattaattttacattgctgacattattattagactccctctgttgccatggccaattgaactaaagtaagtgacagtacttcaataagtgaaagggctttattaaagcatgcacatgaaatataatgaggatgactggagctggctcaaagaggtggtgatccaaaagttccatggacataatcacacttacagaatttgctggtaaaaatggcaaaaggaaaggcagtaaggaaatggcagttgggggtgggaatggcagctcatttctagaggttgcccaaacaagaggtatgaccaaaaggtctggagacactggtatcattgctgccttagctgggtggacttatagatgtagacaatgtctgagaattagacagggagacagaggatgtccagatgacaggtgcattctgattagccaactaagtaatacctaaccacatgctcactcccattcatattcagaaaacacattcacagaggaactaaatctttccccactcctatctgaagttcccaagtaatcaagtgctactaccatctgcaaatttttaaggagacccagagagcttactcaaaagcctcatttatttattcattggaggagtatttattaaaaaccttttatgtgtcttaggtgcaaagaatgtaagaagagcttactcggtccctgacctgtagtaggagaagatccgtgtgctatgtcatctcagggaaatgtgtgcagacaattctgggaaggatggcaaggcaagggtggccaggtctgacttgaaggtggaaggagggtgggattgtgcataattcaaagcagtttttttctccttccagataaggagtatcttgtttgttatcagaatggaacttatcagtagagaaaaattggagacaatttatgaaagaggagagaacatggagagcttgcatgcagtggttccagctgggagccctagtctcagcaagaaggaagacactatattttctgattcaagtagaagaaggagaagacagatgaagatacagataattttgatatggagggaagttgaggcaactcatgtcagatggtcccaaccttctcagcaaggagagttcatctgttgagagtttcaggaaaggaggtgtggatgttgctggagaatgcctagataagtcactgtggaaaatgccattctccatttctgtctgtttggcaaaccccaataatcctccaggactcagatcaaacaacatctcctgtaacctcccaagttctcagacagagttgggagctctgttccctgcacttgtttttctattaccttattagtcatatcgtattataattcttttcatttctgtctctcttttcctcttgcctgaaatccttgagggtggagaccatattttactcatcttaatttctccaactctaatctggtacaaaatgatattcaggaaatgtgtgttgaatgcataaataaattactccataagccatacataaaagaattgcaattcagatccagaaagattaaggaataacattttagaactggcatcctaaatgtctagtttcatttcagagcaaaacagtctgctcttggccaattaccctaaccttgctgcatctaataacccaggctctgaaaaatggagacaacaattcatggagctgtgagtttcagcatgaatgcctgtaaagggctttttaagtggcaaagcagataattacagaaaaggcccttgaggaggaaggatgactaagacatgtctcggagacaatgaaagaccatcctttcaggatttctaccacatttcactctgatacaagcagttacagaggatctagggccctctcaaaggccttggcaccactagattccaagattatgtgttcaccaagttcacgaactgttgtgaaggaatagtggttagaaagaaccagagtccttctgctcagcacctcccagctcagggccactgtgctctctgcggaactttcagctttttctattgttctgttttgccttggctcctagtttcctctcttacagatcatcaacagatcactcaaatgtgcttgacctttggaaatacacttctgttcctgggaagtacatgatcatttatcactgccatttaccaagtgttagcaagataaatagctacctgggtaagccttgaaagcagccactagcccatttgcacgagatgtgatacaatttatcccagaagagccacaaaaagagtaagatgctgaacaatacggtctgttaatagatgcatacattctggagctttataaaaacaacaaataggtgaataagacattttatacctatttctaagactgtagaaacctaaggcataatctacactagattgcctgttctaatttacagtagcattgctatgaataaaataagaaaattgataattctaaaacattgtttgattcataattcccctctacacacacaaatgcacacagacacacaaacacacacccacgtgcatgtgtgtgcacagacacctgcctctaaaattggattttgttgaagataaattttaattagtttgccccccaatacacatactctaggtttagcaatatgtgtgataacgatcggtaaggatagcctggggtttttaattgtcatagttaatcaaaaggtgactatatacaggagaacagattagagttggaaagagtagtagaagaaaaaaaagaattgggactagaagagaagaaaaaaatagaaaaccaaaaaagaaggataggccaggtgcgctggctcgcacctgtaatcctagcactttgggaggtcgaggcgggtggatcacgaagtcaggagttcgagaccagcctggccaatattgtgaaaccctgtctatactaaaaatacaaaaattatccgggcatggtggcacatgcctgtagtcccacctacttgggaggctgaggcagaagaatcacttgaaccagggaggcggaggttgcagttagctgagatcgcaccactgtactccagcctgggagacagagcaagactctgtctcaaaaaaaaaaaaaaaaaagaaggataacaatctttattagtagataggagtgtcagttagtggtctcaattctttcccatactgattgtcagtacatattcaacacataaacacctccagagtaggggcagttcagatttgaggaggaccttaaatagctatatacattatcctaaaggagcttttactttctgaaactgcaggctgctttcttatcaccagagcctgcagttatgcatcaacattaaatgtagaaagtttgctacagctataatcaaaactctggttagtatctacattagctagttgatattaatattagccactcagagctcttttgaaacttaaaattagttggaagagaaacaaaatgacagcatttcttattattgatataacttaagggcccacacagagcctgaattgactttactcaaggattccatatatagaagcctttcaattgctggaaagttagatcacttataactgtgaagtatgattgaatgaccttgtgtgaaaatggcaagattattctgtgatgtagccttcattggaacgttccatccctgccagagaggccacttgttcattacgtgggagaaattgctaaaacaatagtcagtcctgccctcactgatcaaaacatctccagggatcctctatgctgcttgggcccaaaggacccgactctatgtgccttgattaactttctttggccctagttcatcactcagaaatgtctgtctttagcggaatcttagcttgtgactttttttgggtaaagtcaaggtaaataattttggagcccaacatactttagaaattgtaggtcactattccatcaataaaaacataaataaaagaaagcctcattcggaagaataaaccagtatgtcctcaatgtaacagacacaaattagaagagttagaaagatcttgccttttttgaggtctaggtcttcaaatctctctcctcagtatctcaattccttcaaaaaaaaattcaagtactgaatttggaaagattaaagtctagggaagaaagagtaggggaaagcaagaccagtagcttaggagaaggggggagaggagaagaggggccatatcatgattaaagcttccatcatgcaatcaatcaaatgcaggatataaaaggcaaccataatgaaaagtacaaacactcgctgcatacacttagaatctaacacttgtagaaaaaagtaggatataagtcatcacttcaactgtccatttatagatttatagaaactaaggctcaaggctctcaagtgactaatgagctgttttagagtacaagagaagccaagccacaaccagaatttaaaagccaagatctgaaaaccaagcaaatgtatgaaattctcttcttttttcttaaaaagcattcaaagagagaaaaaactaatctcttccatggcaaaatgcataagtatatacaataactcatagataagggtttttttaatctaataatctaactgcttcaatttcttctgcttgtggacgctgcatttacatccatgctttgtcaattactttatgtttcttggttctgtctcccaaactaaactccaaatacttgagggtaatgtctttttcttttatcaatatcaatttcttaccatgctcactatgattgatagtgtcccatagaattactgaaaatgcttaacacaagtctaactttggttttcccttaggtaagagggatttgttgaagtgcaacactcttgacccactgcaaatatcactaccaaaattctccatttgagatattgataataattactctgtaccttctttcatttggattgtagtaattgtaacgtttcaaagcatattttatggctaccgtttcacttgaatatttgtttcatgagtggacctcaaagaacattacaactacaaatccgccaattgccccacctgccaaaaagattatatcctgggtcttggtgtgttttggtgcactggtaattggttattcctcctccaggcatggaaatctcgattcacaattcactgggttagaatataacaatagtcagcactggagacagacagtgctcaactgacaaagtatatcaactccaactgtaaaaagatccagaaggcaaaaatacagacttctgagtccttgtagtgttgagggaagagacctcagtgtccttccatgacccccgcctccagtaatatgtccttagtgtttatagcatcctcccatcctgacatttcctcataatttagcattcctggtaaggcttaaaggaaagctgaatttttcactggaggtaggtcatgctgacagtgatagcaactgacaggagattaaaaggaaccaaagatacagtgttgaaaaagtctcatcaaggtcacccactcttgataaggcaagtgaagagcgagggagaaatataggcttatcacttaagaaccagcagggacaactacattatctaattattcctcttcatttccacctcctgtagtctcccactcctacacacgtgcttttaagccagtccattattttaaaattactttacggtagttctccttatcagttcaaggtacagctgcctttaaaggcagtgccaccagcagtcccaaccctgccaagtagaggtagctgctccccagggcactcagctcagccttttactatagcacgtacatgtttacatgactttctccccccaaaactgtgaacccttcatggttacaagcatgtcttactcatctttctacctacctgcatggtgacagagctagccagctatctattaaattcagaattctcccctagcactgagttgctgctgggaagctgctaccaagccagggactacattttccagctcaatttccatccagatgtggccatgggataataattagccaatggaaaatgaacagatgtgaggtatttcacttggaggcttttataacacatcatatatatatacacgtatatatacatatatattatgtgttatatttcatatatatacatgtatacatatgtatatatatgatgtgttatatttatatatatttatatgatgtgttataaaagcctccatatatgtaactttttttttttgagatggagtcttggtctgtcacccaggctggagtgcagtggtgcgatgtcggctcactgcaagttccacctcctgggttcacaccattctcctggctcagcctcccaagtagctgggactacaggtgactgccaccatgcccagctaattttttttgtatttttagtagagacggggtttcattgtgttagccaggatggtctcgatctcctaacctcatgatccacccacctcggcctcccaaagtgctgggaataattttctttttttttttttttgagacagagtctcgctcttgtcgcccaggctggagagcagtggcatgatctcggctcactgcaacctccgcctcccaggttcaagtgattctctcgcctcagcctcctgagtagctgagcacttgccaccacacccggccaattttttgtatttttagtagagacagggtttcaccatgttggccaggctggtctcgaactcctgacctcaagtgatccacccaccatggtctcccaaagtgctgggattataggcgtgagccaccatgcccagccatatttttataacacgccacggtctttggcctgctgtcaggtaagtggatgcagaggttgataaacagcaaggagctggctgacccgtgtgatggaaagaacttggactcctgaatcactgtatcagctactactgaccagaaacaatgtattggacaattacaagaggagaaaataggcttctatctttaaaaatctttatatatttttgggtcttcttttttttactgaagtatactttatttaatacatgaatttaatacagtggcatatataggtgttcaagagatggtgaataactgaataaggtacttgcccatttgcccatggaagagcctgaatatttcatactttcccaagaaagattatttatggattgcagctcatgaaattatatgcaataattgttattatggaaatcttcccagaatgctatatgaaacagactaatgtgactggggttttatttaatcttatagttgttttttacaaattcatagatacaaatttaattttttttttttttactgtgggagaatgttgaggttgccatagcaacaagttaaagcaatagagtgtatgtgatggactaagatgcttggtgctagccatgccagcaaaaaaataaaatgattgtatcatacagaaaactagactaagggctatggtgtgatagtcaactatttgtctttcaccttctatttattataatttaagacactgattagttgacaattttgacaatattgctagtttattgctagttctgtaatgaaattaattttagaataaagatcatcattctaaccaccctatccccacctgcctgaggggaaaaaatacacacacacacacacacacacacacacacacacacacacacacacagatatctactgcataacaacattttggtcaacaacataccacatatacaatggtggtcccataaggttttaatggagctgataaattcctatctcctagtgatgtcatagccatcgtaacgtcatagcataacacatcaccttttccatatttagatatgtttagatgcacaaatacttgttttgcagttgtttacagtgttcagtacagtaacatgctgtacaggtttgtggcctaggaacaataggctatacaaaatagctcaggtgtgtagtaggttataccaactaaagttgtgtaagcacactctatgctgatcacacaacaatgaaatcacttcatgatgcagtcctcagaatatatcttcattgttaagtaaagcatgactatgtatgatgcatgactgtctctcatatccatttatgtatctattcatgagaggtttgggagcaaatttttaaaacaattactccaactctctgatttactttaccacacagacagggtctttattgatcccttctctgtggaccggaagcctatttttccgccatatatttgcaactcattcaaatgatcatcattaccttacagaaaattaaacgattcaagtggtgctatcctaccttcccccagagatattattctcctttctaagtgaccctaggcttcaaagtgtctagaggcactgacacgtgtcttgagacaacaaaaaagacaggtgacttggattatcatgcaggatccagaataagcatgtggtcagctagagtagtttggcaagtaaggatgatttggggtgactaatattcctaactgttctttgaatgagtaaaataaaataagaaaaaaaattgcttattttcagatttcctttctcactgaagccctagaaggtaattcaagaaaaccttcaactcttgtggggggcggaggggagaagaaacatgacatctccacttttagcctagagtcccccttttctccccatctcattatgtcatttctatttacatgtgctgattaaataatttcttctccagccccctccttgcttcattcagaaactgtattgacccaacttcctggagaggaaacccaagctttgagagccccttccctaactgggatagcaggagccacgcagggaacagattctgaccctgggagaagtcattactatattgagaagcatgacacaaaagatgcagaccctcaactccactgcaatagtatgaagcattttaatgtagaacaggaaggcatatgcaaacgtaaagaggaattaaattcggtacaacgccagacagtctccagcgcccccacccccttgactgctcctgctacaaaccagggtcaaaggcagaggggatcaataatgctaaagagtagtgctgcagtaagaaacaaatcattgcaaatagataaaatggtctctgtgctcagggctcctgatgaaagtcccacatctgccatttgacattagcctagtgacaccccctccataggagaggggaataagcaagagagatagggaaagaaatagcaggagccgggggtgatatcacaggattgtgttgtcttcaactgagaagccccaaatacctgtgtccgtctggccaattcaaggagaaatcactgaggttgtaaactatttttagaatcactggggataaactatacctcagtttcaagaggtcataaggtagcttagtgaagtcaacagaaggataaacagaaagctaattgtatttaatgacttatatttgttaagtgcttataacataaaccatgcattttactaataagaaatgcaggctgggctcagtggctcacgcctgtaatcccagcactttgggaggccgaggcaggtggatcacctgagatcaggagattaagactagcctggccaacatggtgaaacccgtatctactaaaaatacaaaaaattaggcatatgtggtggcttatgcctgtagtcccagctacttgggaggctgaggcacgagaatcccttgaacccaggaggcagaggttgcaatgagccgacattaggccactgcactccagcctggacaacaaattgagactcggtctccaaaaaaaaaaaaaaaagaggccgggcgcggtggctcacgcctgtaatcccagcactttgggaggccgaggtgggcggatcacgaggtcaggagatcgagaccatcctggctaacacggtgataccctgtctctactaaaaatacaaaaaaatcagccaggcgcagtggcgggcgcctgtagtcccagccactcgggaggctgaggcaggagaatggcgtgaacccgggaggcggaacttgcagtgagccgagactgcgccactgcaccccagcctgggtgacagagtaagattctgttttggaaaaaaaaaaaaaagaaagaaagaaagaaggaaagaaagagagagagagagagagagaaagaaagaaagaaagaaagaaagaaagaaagaaagaaagaaagaaagaaagaaagaaagaaagaaagaaagagagagagagagagagagagaaagaaagaaagaaagaaagaaagaaagaaacagaaagagaaagatgaggctcagagaaattaaatcactttcccagtatcataagattataaatggtagatccaggaccaaggtctgcttcactataaagcgagatagtgctcttaaccccaatgttacctctctcaaggttcatttgtaaatacaattaaatatctttctcaaagcatttcctgttgtcgtggtcttcaacaggtagaggtcattagtgtgcatgtgacctatctggattcatagcccctgatgaaataaggagaaaagtgtctctaaaggtgattgtgctgtctggttatagggtagagccataaaacaatggattgtagggaaatgcagtcagcatagagatttaagcctagtactataccatttgcttccgttggctaaatctgttcagagaaaattatgctgttgaattaaagcaataaactggtgatttctactgttggtcattaatcttctgtgtttttgttgttgttgtcaatatatgacatataatggtgagaaccttcactgatagaagcaagagtagtataggagacagagaactgcttgccaagaaataaattccatattgggagtgcacttttgccttttctgtaggcaaaacggcctcagtattcccaagtctcttgactcacttcactgatgctaccctagcggtaaaaaaggaaaaactctaaatgaccaacaaccactttgttttacttgtggttgaaaattatttttctgctttatgaaggaaagtaagatttattgagcaggtacaatacatttcttatgctaggtgatttatacacacattatctcaccgacttctcacaactgtcttttgagatactacatgcccaccttccagctgatggaactggagttagagtgatcaatttgcctggagcagcaatctatgtagctgcataggaattcaagtccacattcttgggactttccagtcagtactctttcctctactctcttccttggtcctctttaatgatttaggtccttgtcacacctctttgggttatcattctaaatttcaacagtcatagatcaatagagtaggaggtatagatcagaggtgcccaatcttttgacttccccgggacacactggaagaagaagaattgtctaaggccacacataaaacacactaacgctagcgatagctgatgagattttttttttaatcgcaaaatatctcataatgttttaagaaagtttacaaatttgtgttgggccactttcaaagccatcctgggtcacatgtgccccacgggtcatgggttacacaagcttggtatagaagattaagctgaaaaagtgtactgaaataaatgtatattcttgaagttaatgctttgtctaaactcttaagctaatgggtttatctctctttatctctttcaactaaagttggaatatagaaaaatcattttaattacttgaaagtttgggttagctgattccagatttctggagacttaaagataagcatctcatgtcaaaaaaaaaaacccctctattggataatgaataattggcaaagaatgtgagaggaggagatataatgcgtcttcaacctctgagaaccatgcatgtagaggaaagagcttgatctgaaagtcacccagtcccaaatgagaatgctggatccaccactgggtaaagtggagcaagttattttatgtctctgagcctctttctcttcatctttataatctaaatgatgccatcaaccttagagtgttgttatgagggccaaatgagatgatatatacaaaatgtcaagcattctgcctggcacatagacaccttcagtaaagcttagtttcttgcccaatcccttctgatatagctttttattaatgtagatttttttaaattttatttttaaatttttgagattttcaaaatatttttacattttggggggttccatcatgatattttgatacatgtcatgtgtagtgatcaggtcagatgaattagcatatccatcacctcaaatgtttgtcatttctatgtattgggaagttcactatcctctcttctagctatttgaaaatacatattattgttaactacagtcatcttacagtgtgctaaagcactagaagttatctctctcatctggttggtacagccactatgaagaacagtatggcagtttcttaaaaagtgtatccagcaatcccactactgggtttttttgtttgtttgtttgtttgtttgttttttagatggagtttcactctgttgcacggctagagcgcagtggcgtggtctcggctcactgcaacctccgcctcccaggttcaagtaattctcctgcctcaacctcccaagtagctgagactacaggtacctgccaccacacccagctaatttttgtatttttagtagagacagagtttcaccatgttggccaggctggtctcgaactcctgacctcaagtgattcgcccgcctcagcctcccaatgtgtggggattacaggcatgagccaccatgcctggcacagtactgggtatttatccaaagaaaaggaaattgatatgtcaaagaggtgtcaacaccttgatgttcactgcatcactattcacaatggccaagatatggaatcaacccaagtgtccaacaacaaatgaacagataaagcaaatgtagtatatgtgcccaatggaatactattcagccataaaaaaagaataaaatcctgtcatttgcggcaacatggatgagagcctggagaacaatatgttaagttaaataagccaggaacagaaagttaaacaccacatgttctcattcttgtgtggaaactaaagaagttgctctcacagaagcagagtagaacagaggttactagaggctaagaaggctagggggaaggaggacagagatttattaaactatgcatctgtttattatacttggataagttggcttgagggcatgtgcagtgcacactgtagtccagtggagagtccatctagggaggaaattgtttcttattctcactttctgcaaattgaattggttggaggaagaggccatttatagccttgccatttataaccatggctacactggtattcatggctgggaaggtggcatttcaaacaaagaatgtctgacaattgtaggcccagatgattactttactactatttgttgtgttgtagaacagatctccatattgtgtcattcggagtcactcacaactgcctggatcccacagatggtgtctccgcttttatactgccctactttcccagaatttctccatctccagggccattaccgcctcctgactctctcgcacttatcttattatgctattatcctgcacccagcactggctgttttattttctactttctgccacaatattatggtcctgagttgcagcctcctagatagtgtctgtctgcttactgtttgtgtgcttcgctggggaaaagggtggtacgcagtctccatttgtacatacgttatcagaggagagacaatgccaaagcattcaggggagcgggaacatgctactggggatgctgcaggcagagggagaggtagagcactccagctaaaagaattaaaacccatagtttaaagtcaccacataccctgatacataaacaatccagactgaaagggaaagttagcaattagctagcaaattatttttacattcgttctcctttttgaaaaatcactttgcagtattaatatcaagagtgactgcctacacagagttctctgcctcaattacagccatgtttgcatatagattgaacagaatggaattcaagggttgtttggatccagtgccaggttcaaattacaccttgagtttcaagtattagttgtgtcatctggattatagtcttagctctgcaatgagtctgccagattactcaatgtctttgagcccccatttcctcatctataaaatgggaataatactgtctatcttgcatggttttaggaaagataaatgaaatatatatgagcttctgattttgtgcctgattcataatcagagcaactgatgtctctttactcatccttcttcgttctttaacactcaaattcatcatcactgcatcaatccacaagcaattaattattacataaccctgatggcctatcttaccagctaaaatgaagtttccatggggctagaatcattgcattttactcagcccagggacttagactaaaagctcaacaaatattagtggatttaggagagagtgggatgataaacctgtacaacaactgatgagttcaagggaagagaagattatagttttcctaatttgattttttagccacattcttatacaaattatcattagtagtaaccttttcaaaaatattctttctctatttttatgtacagaaaatgagagagagaaagaaagaaagagagaaagagagagaaacagagaaagaagataatccttagaagcttcctatgctaaatagcagtctctgacccatattaaccagaatgctcacagaaaacaaaccaatcacttctaaggataattactactaattatcttcattagtaaagatattgtaaggccagatgattactttactactgttcgttgcaggcatgataaagtttgaatcaaactctgatttactattaattctctttattagtaaagataactagcagtaataatattagtattaccactagtttagtatcaatactactaaatactagtagaactagtattattactattaataattacaattcactactaaccacttctagagataatttagaaggaagatgtgatttaggaaaagagggagggagaacccctgcctcccacagctaaacaaaagtgacttttcaattttctgacattttaatattatcagtgttagtattctagtccagtgatgaaacagattgaaagttgacagtgtatctttcctgaactctcaagcagatcataatcagacatcatctttatttactgaacacctactacgtgtccctagctcagcagcccagaaactaattcagatcaccttagcccccacgggatgaagtttgagccatgcatgataaagtttgaatcaaactctgatttagaaggaagaaacaagcgagccgcctcaaaaggaaggaaaaaggcaccggcccccattctgggagggacatcgcctcgacctctcctcaaaggaagtcttaagtgtggacccaggtgctgctgaggggggcctggtagggcgggggaagataaaaggctttctggaggccctctgaccccagccatcccacgggaaatgagcgaggaggctgctggctggcagacaagcaggtgtgcccttcagaagccacggagattagctggggcttatccaaacctctgcaggaggcaaatctctcctggttctctcaggagacctcggtgctcctctggcatcaaataagccagatgcagaatgaacgtcaacttggccttttgtgaatctagggccccagactgggaatcgggacactatcatactcaccagggccccaaagagaataagtttttagagagtaaatttaaaaaaggaaaagggggagaaaaatgacttcaaggcaagatcacagatgaagcttcacttatgtttgaatctttgtctttggagcaattgtctgccacccatattagaccaaaagctgcttttttctctagaaaacaacttctggggaaaataggtgatatttgttcttcagcaaaggtaaaaaccagaagactcaaaggttgagagctctctttctcagaaactccaaaagaagaaagcaaattagcaatttcagcagtgagaggagggggacgtaggtccccatgggtgtagaatatgtcagctttgtgctgtgtcaaagtatatggatgtccaagaaagatcagtggtgttagatccagccgatcaaatatgcattgaaattctgattcttctatgtatctgctgtgttattttaaagcagtcacttaacctctctgagcatcaatcatcccaccctaagatgagcccagcaatggctccttcacagagcagtttaagcattaataggataacttatgtaaacacctggcatagtaaccagcacatagaagacgctaaagaaaaattagcaccttctatttttccctttctttcagcaatccaatcatatatatattagctatacagatagatattatatatctactatatattacataaaatgatggattacatattttatatatctacaatgtatattatataattgatatatattatatgatatataattgatatatatcagtgttactattacattcaatgatgaaacagattgaaagttatatatatacaatatgatatataattatatgatatataagagatatatattatatgataataattgatacatatcaattaatatcattgatatcagaagtcacaggtatcaattatatatcatatatgtcatatgtcagatatcaattatatattttatattatagatctatattttatatatatctatatatagatatattttatattatagatatatattttatatatatattataggtatatatttatatatatctccctcatataaaacaaaagataaaatccttactattttggacctgtagaaacccattctcagcaggataagtacttgcccaaacttcacatagacagaaagagcagaggttagaacacagatctccctgatgcccttgctagaacttgctgtttaattggcaccataaagacagcctaatactcagtctcagaatgatctaataatggccatagtagaagagagacctcagaatcagataccagtataccacaggccacttcttgcagaggtgtccatcagggagatggtagttgtaattgtctctcaaacatggttgaaactggctcacaaaacatgtggggcatatggagtataggtgggactggtagggtgtggtactcattttttttgttgttgttttttgttttgagacagggtctcactctgtcaccaagaatggagtgcggtggtgcgatctcagctcactgcaacctctgcctcccaggctcaagcgattctcctgcttcagcctcccgagtagtgggattacaggcacacaccaccacgcccagctaatttttttgtatttttagcatagacgagatttggccatgttggccaggctgacctcaaactcctgacctcaagtcacccacctcatcctctcaaaatgctgggattacaggcgtgaaccaccacgcccagcctcaatacttttaactagtaatgtcaccaagagctcttttatcttttaaactggttgtgccacatatatatataagacaattcactctggagaggctgaaaatgtagagctgtccctgattcaataacaacaacaacaacaacaacaataatagtaactttattttattttattttcaaagcccccttcttcacgagcacttatggcaaaagcaggaatataactctgaggactgatccacagccttcccccaaactatcccaattatttttgtggtaggaagtttctctgtgagagatcagattgtggtaaaccttgtctttgtttgttcccagaaatagttgaatttctactcctgttagaattgtcttgtcaccaacagctaaactttcataattttagaactagaaggaatcatgtacaggttctaattttcccctcttgctttctaaatgaagaaattaagggagactcagagatgtggaataactcacccaaagacaagaaacaaacatggccagctcttcacctcatgctttccccagagtttcagggacccatgtgtggacaaaagaaacaatcttcttgggcaatctttattttccccacagagctaactgtgcacagagcccatgataaaggcacttaagtccaaaagagcacaattattatgacaaatatccaaatatttcattaaacatcctcaggaaaaagtaaataaataaaatgccaaaaagtccttcaaagatttgaaagcagcattgcctttttaatttagagctttctttgtggattgtcaaagcacttaaaatttttgaaactgctataattaattattattaagctagcaaatcactgaaaatataatctttggtttattttcattatatctgatgaaattgtttcacacaactaaaattaactgagcacttactacgtgccaggtagatgctaagtgcttagaatacaatgatgaaaagccatcgtctctctgctcaagaaattcacagtctagggtggggtaaaacagctactacacaaaatagatcaatgacctaaatgtaagacctaaaactataaaactcttagaagaaaacataggagaaaaatttcatgacactggattttttcaatgatttcttggatataacaccaatagcacatgcaataaaagaaaaagtagataaattaaactacatcaaagttaaaagcttttgtggactaaaggacgaaattaacagagtgaaaagacaactcaccggatggaagagaacatttgccaatcatagatctgataaaggatccagaatatataaaacactaccaaaactcaacaacaaaaaaaccagacaacctgattcaaaaatgagtagacttgaatagacatttctccaaagatatacaagtaaccagtaagcacagaaaaaaaacagcataactaattattaaagaagtgcaaatcaaaaccatgatgagatatcactttacccctattaggatggctaccattaaaaaaaaaaaacacagaaactaataagtattgatgaggatacggaaaaattaaaatccttactggaatgtaaaatggtgccactgctatggaaactagtgtagtggtacttcaaaaaattgaaaacatagttaccatttgatctctcaattccaattctgagtttgtacccaaaggaatcgaaagcagggactcaaagagagatctgtagcagtattattcttaatagccaaaagatggaagcaaaccaagtgtccatggatggatgaatggataaataaaatgtggcatatacatacaatggaatattattaaaccttaaacaagaaggaagttcggacacatgctataacatggatgaacctaaaggacatatgctaggtgatataagccaatcacaaaacaacaaatattgtatgaaaccacttatatgaagtatctagagttcaaattcatagagatagaaaatagaatggtggtttccaggagctgaggtgagggagtaatggataaacatttttaatagatacagaatttcagttttgcaaaatgaaaagagttctgtggatggatagtggtgatgctagcacaacagtgtgaattagtttacaactactgtacatacagttaaaaatggttaagatggtaatttttatgaatttttttaccgaaattttaaaaatatacaagtactacactcaccattattagtaaactcaccagatgccagcataggtctccagggactatattaggtggaacccctatagaaatccactcaaaaagaaatcttcagattctattgaaagtataatatgatatactgagagtaaaagagaagaagctttgttgaaaaaagctggtaaactgcagagccctatctagtcttttttggagaccataaagctcactagaacgttataaaaccaatagtgctaaatttttccattaataaaaatcattttaaatgccatttccatctctatagaatatacacattaggacagacaaacattagtttttgccattgaccattgagaggctgtgcttcatggtatgtggcaggggcatgggtactgtttgccaggcttgggggatctttgttgttatttggtacattttagaaacaaacgttaaactcgctggtaaggacttaccagttgtacttcctcgaggagatactctagatcttagttcctcttagcagtgaaggtttcctggaatgtcatagtcttggaaggaggtgaacgattggatgtgtaacaccgggatcttcactgagagtgaatacaagaaaaatcaattatctaagatgcaggtaaaataatttcccatgaccccaacattcatagatgtcatccaatctatcagtgcctttaaaaagccacaactttactcagagcatttaacaagctctccttttatgtcttctctttgctggatactgtgagaggttaggggtatgcataaacaagatacaatccctgtatttgataatcttacatcctagagtatgacaaagcataaagaaggaatgacaatgtcattatataggatatattttggtttcatctgcataagctaaagaaagcacacacacctcccctcacaccactttccaacgagacagccaaagcctatagaaacgaaaaagtgagtcaagtaatgccacttcatgcattttgtccaatgaggtgactgtctgaaatccatagtttctgatgcccagtgtccccctcatgagatgccccatctccatctgaacttggttggagccagaaactaagactgagattgtagtctcccatcctcattcaagctcgtgagcctcccaaataggaaacactccctgtcccttggccacagaataggcagccacttgatcagaaaagcaagcagccagctagtgcaaatggcaaatccatcagcaccattatccaaatggtaaggttggcagtattgtcgtcacaaattaaaaatgacacatcacaacaattacatggcttctcactgcctgacatgctggttcagcctaattcccagactgtttcagacacccaaacaaattaacacgttttctaatgatataaaattgtgttgctctgtgtgtgtgtatgtatgtgtaaacctccatacaaccacatcatcatcaattaaatatttatcagagttccactgacctgtgacaagcatcagcaattggcccttggagcatcagtgttggctattttttaaagccagcttctagcctcggtcagtggaacatgttaaacctcaatgaacagctctcactatcttttgtactggatccatactccaggctgaaggaagcttttagaaccagcaagaaccagatggccctccaagatcatttttgaatgtttggatctgagtcatttgtatgcggaagccttcacaaaatagcaatctggggaacatgctccaggctgagtccagctttccagacagcccatctttgcctacaattgagaagacaagcacaatattgtagggttccacaaaaatattgcagcatttatctatatgtgtagcaccaaatacatggagtgtcccagtcaggctgtcactacaatggtagttcgccaccgctcttcctcctcactccccctaattatttttcttttttctattgtacctacagtttctcttctagcacaggcataaagccatctttgcaaatcggccagcagagggtactacaatactggtgcaataatccaaatcacagcaaatttacagctgaaaaagatttagacaaattaaaatgggctttggttttatgatgtgcttggagctcctagccagaaataagagagtggtgggatggaagagatggaaccaaaactggtagacagggactgctcatcagaggaagaggcaaggcagcagtgtaggttcagtatcactaatccgggggtgaggcaaacctagattcaaaagtgagaaggaatcaaaactaaggggtcaaccgcttctaggtattcaccctagaaaaactttttaaatacctgtatgtgaatatttataacagttctatttataatcgccccaaactaggaacaatccagatgtcttttaatcagtgaatgaagaaaccaagtgtggtatatccatacaatggaatactactcaggggtaaaaaagaagaaattatgaatacatacagtaacagggatgaatctcaaaggcattatgttgagtggtggaagccattcttaaaaagaaagttagataaatatgagtccatttagatgacattctcaacagatcagcaattgccagagattggggctgaagagaaggtataactataaagaaatagcatgaaagaattctttggagttatggaaatgttctgtattttattactgttgatgattacatcaatctatacatgtgttaaatttatagaaacagtacaccaaaaattaatgtcagtgtttcagcttaatgtaaaattgtttcattaatggtatgctaaatttaaaaaagaaaattttaaaaagaaaaaaaagacattaaaaaaagatggagcctgagggcagaatgggataagcagataaagagtgaggccaatttgaggtctcatcaagcatgtatagaggaggtaaattatgagaagacagagttgagttgagacttggaggacagactaataggaaattggtgagaagatcaggttcttcacactcactttgtttttgtgaacagtggtgtttcactgagtatcaaccagcagcttgagctgaagggaccacagaagccacctggacccacatggtgttgatggacaagaaggtcaccagtcagggttggtgcaggaccagaatctgcccaccctaggagccagcatctatgctggtgtagaaaagaatcaagttaattctaggagccatcatcatgacagtatggacagcctcaagttaattcttcacctcactcgctggtaggaataggctcattatctttgggcaggggtttagttgagagaggaagtgataaacaaaactagataaatgtaatctaaccctctcatttacagatgaggagcctgggagagcaaagcagtgtgagttctccaaattgcacagcttatgagtgcccttcagggttctgtaagttggccctggaccagggaccaggaatggtatttcttctcatctgccttaggtaggtgagattgtgttttatatttaaaagatagcaagacaaacaatggtgactccatagcatgccattagaatccattgaaaaatatactacctcccttcaaacctttgttgttgttcttttctcagatgaattgctcgagaattcctgtgcctgattcttatatcagccttctcttattctatccaatgattagactgctgattgaaaaaaacagtccaagagttcttatctatcagattgcctcctatgtctatctacgttttttgtttctgtctaactttggagagctcagaaggaggaggacagtctcacactttgcaatctcactcttagattgaatggtatgcgaaaaaagtcctggttgagaagttgaggcacaggttttgctccatatttgctgataactgcatgtgagattttaggtaagtctcttcctttctctgggccttaatttcctcctctataaagtgagccagttggatttgaagatcttaaagtaatttctagtcctacaatgtttcacttctatgtttagtcttaagtgtaaatgataaatacttaaactgatgcacaaaagaactgataattttcagtttaattcaaaaatatgtacttagagtctattttcaggctatatactagccatgagggatattaaaataattaagaaataaaccctgcctttaagcacatacaatctatggattagaacaagagtctggagttaaaggttacagattcaaggacactgctctacttgaaatgactcagaccatttatttaacctctctgaacctatttcttcatctataaattgtgaataataatagctccccctgggagtgaagaataaatgaaagtatattagtttttattatgaagtcattcatatcactatcctgccctcttgaaacagcatttttctttctcgcccataccttttggcaaatgatctccatttttaatctctcaaagctgaacaagctattaatactttcagatgcaactcaagtttcacttatccgagaagacttatctgtctgctccagacaatacagatctcccttgcctctggttttctgttgccaatgtttaacacttctatggtactgtctattgcttctattctattgcctcacaattacttgggtatttatggttttaagctctcttgaactccagttctttatattatcaactgcctatagtgacttcaaattctacctgtatcaagtagaatccacaattatttccagaaaccctactcctcttcttgggctcatttcagtttatagtatctcagtcactcaaactaaacacctgtttgtcatgtttcctctccattacaccctcatccaatccatcctatgtaattccaactcatgtgcctctcaaatccattctttatcatctccattgtcacagccttacttaagtacctcttggctaaattaaagcaatggtagagggaaggatttatcagtatcatctagcaagcatttttcaaaatgcttaccttcctgtaaccccatatcgcatcagaagtgtggttgaaggagaagacagaacggtggaggaaaaaccaggcttgcgtattttgcaaaagctttacagattattctcacagatttcccattcctgttgagaatcactgtcttaatctttctccttccaatccttcctgcctgtcctgcctgagtaacttttcaaaacttccagttaatcaataaaggcttctcattgcctttcttcaggttggctttcacattctgccccaggccactctcttgcccttgttttcttcaatttcttccatgcctatattagtccatttgtactgccataaagaaatacctgaggctgggtaatttataaagaaaagagatttatttgtctcatggttccgcaggctgtacaagaagcatggcattggcatttgcttctggtaaagacctcaggaagtttccaatcatgtcagaaggtggagggggtacaggcacatcacatggctagaatgggactcaaagagaggagggagaggtctcagtttcttttaaacacccagatctcatgttaactaactgagcatgaactcactcatcatcaaagggattgcactaagccattcaataagaatctgtccgcctgtaatcccagcactttgggaggccgaggcgggcggatcacgaggtcaggagatcgagaccatcctggctaacacggtgaaaccccgtctctactaaaaatacaaaaaattagctgggcgtggtagcgggcgcctgtagtcccagctactcgggaggctgaggcaggagaatggcgtgaacccgggaggtggagcttgcagtgagccgagatcgcgccactgcactccagcctgggcgacagagcgagactccgtctcaaaaaaaaaaaaaaaaaaaaaaaaaaagaatctgtccccatgacccaatatcctccactaagccccatctccaacattggggatgacctttcaacatgagatttggaaaggacaaacatccaaaccatatcattttcccctggcccctgaaatctcatgtccttctcatattgcaaaattcagtcatcccttttcaatagtttttcaaagtcttgacgtgttctaatgccaactcaagtgtcccaagtccaaaatctcatctgaagatgagatcctttgacctatgagcctttgtgatcaaaaacaaattatttatttcccagatacaataatggtagaggcattttgtggacattctcattgcaagagggagaagttggccaaaagaaaggggcaaacggccctatgcaaatttgaaacccagcagggcagtcatcgaatcttaaagctctaaaataatctactttgactccatgtcctgcatccagggcacactggtgcaagggctgggctcccaaagccttaggcagctctgcttctgtggctttgcaggttgcagccctcatggctgctctcatgagatggagttgagtgcctgcaacttttccaggctcagaatgtaagctgccattattgggtctggagggcaacagccttgttcccacagctccactaggctgtgccccaatggaaattctatgtagaggctctaaccccacatttttcctctgcactttcctagtagatgttctctatgggggctctgcctctgtagcaggtttctgcctgggcacccaggctttctcatacatcctttgaaatctagatggaagctgcctagtctccttcactgttgcattctgtgcacctgcaggcctaacaccacgtggaagctgccaaggcttgcagaggtttggcacctgctggagctgccaaggcttacagaggcttgcacgtgctggagctttgacctgaactatacctgtggccctctgagctgaggctggagccagagtgattaggatgcaaggagcaaattcccagggtggcgtagagcagtagcaccctgggcctggcccatgaaaccattctttccttataggcctctgggcctgtgatggaaggggctgccttgaagatctctgaaacgccttcaaggccttttccccattgtcttggatattagcacctggctccattttagtcatgcaagtctctcttgcaagtgattgttccacagaccatttgtatttctctcctgaaaatgcttttttccttctttatcacatagctaagctgcaaattttccaaatttttgtatttaaagttccaaatttaagtcgtttatgtgcttctgtatatgatcataggctgttaaaagcagccaggtcacatcttgaatgctttgctgctcaccagatattctaggtcatcactcttaagttcaagcttcctcagatctctcgggcataaacacaatgcagccaagttctttgctagagcatagcacaggtgacctttactctaattcccaataacttccccatttccatctgagaccttgtaagcctagccttcactatttatatttctattagcactttggtcacaatcatttaactagtgtctaatatgtttcaaactttccctcatcttcctgttttcttctgagctctccaaactcttccaacctctctctgctcattacccagatccaaagtcacttccacatctgcaggtatctttatagcaatagtaataccccactcccagtaccaattttctatgttagtccattcgtgttgtcattaagaaatatctgagtctgggtaatttataaagaaaagaggtttaattggctcagcattctgcaggctatacaaacacggtgctagcatctgcttctagtgagggcctcaggaagcttccaatcatggtggagagtaaagaaagaacgggtgcttcatatggcaggagcaagaagggggaggtctcagactcttttaagcagccagatcacatgtgaaataactgaacaagaacacactcatcaccaaagggatggtgataagccattcatgagggatctgcctccatgatccaatatcccccaccaggcccaacctccaaaattggggatcacattttaatgtgaggtttggaggggacacacatccaaaccattatcagtgccccgcaagttccagccaaaccaaagtagaccttctttctctaaatacaccagagctgttcacaaccccaagcattggttcatgctatctcatcttcttgggattttcttctgttcttatttcactcttcctacctgggagcattccacttaattttcagtgctcagatcaaatgccacctcctccatgaagtcttaagaaatttctaccctcttccaggcaaaattagtcactccttcctctacatatcttcatatctctctattcacagtgctaatacacttaatagcagcttgggtaggccacctttcttaactccctccaaaaggatctggattcctcctttggtttcctaaaacaaattttagacctctgttatagtctataccctattccactttgtgtgtacatggtgtgttttataacctgtttcttaaattagacaacaatccccctcaaagatagacactgccttctcctttaatttcccagcatgaagcaaagattccacagttttaatggatactaaataaataattctttaggcaagattcagattagacatcatcatctcaggaagcctttccaagccctaacaagtggtagtgagctgcatctgtcacatcagcaccctacatgtagcacattctattgaaattacctgcttatgagcctgtactttcactagactgcaagttccttctgggcagcaacagtatttttctctctctcctaccatggcacattacacagtgcctggcagacagttgtactcttcagtgttctggaacaactatgctgaatttactgtaatttccttgcagatgataaacactccaagtgcacttatggcattttttaccactctcaaatttttgacagcatcttcctccaaccctgaattgagagcaaactttcaaacaatatttgtcaattgacaaattattattaaatattcctgaataagtttaggcctgcatatgagaggatggaatgtcccacttagatgtgttcccaggaaaggaaggattcagtcttttaacggccataccccaattctgtttgttgtcatgtatctatatcctgatagttcagcaatgattagtcaagtctctagtaggttggatctgtcactgattcaatctcagcatattgacctggttccattctggccactttcctcctctcctgtggtcccaatatatacaccagattggcatattaaccttgtctaggaatttttaaaaattaaaggccgggcgcggtggctcatgtctgtaatccctgtactttgggaggccaaagagggcagatcacaaggtcaggagttcaagaccagcctgaccaacatggtgaaatcccatctctactaaaaatacaaaaattagccggtcgtggtggcgcgcacctgtaatccagctgaggcaggagattcgggaggcagaggttgcagtgagctgagatcacaccattgcactccagcctgggtgacagagagagactccatctcaaaaaacaggaaaaagaaaaaagaaaaaaaattaaaagggacatgcaaataaaattttcgggaaaattcaaaataatgcctactcatgagacaagtgccattccaacaaagctgagggttgggtcattgctcaatgtattcataatacatagacctgctgggtgatgaaaacttataacattgctttatctaaaactgaaatgttttggaattttttaggtgaatgaaaatatcaggatatttgtggaaataaacccaatctcacatcatcattattaaaataaaagttacaatgctactatgtgatatgttttattttaagcataaaataaagcatgttttactattaggttttttaaaagcataaaaatgaaaagaagctccctttttctccattgtttaaataaaataacataaatctccttttacaagtttataaattaatcaaccattgttgaatgcctgggcataacttagctgacaccatatccaaacattaagctagtgctgagcaaccaatgagaagatagtttttctggaagttggaaaatcacatcaacttgatgtaaataaaaagaacaagctcgacattgatcacagcatatcaactgggaggaggaatggaagcacggttgccatcataatatatcacaatcgcagatatgtcaaaaaattgtaagggtttttccagataggtctagtatgaaattacttggaggcaaaaaataatgacactgcacttcttacttaaagtaaaactcatgggatatcagtgaactttaactcacatcttatgattttatttaaaagtccccagagtcctgattactccaaaattctgtgatctaggattgatgattttctctctgcagtgaggtcattgatgtgattagctgcaatgcagtattttaaggctccattgagaggaatggaataaagtcaagaattgaggcattcgtccagattagtcttataaaatctgatactagatgagaaaaaaaaaaaaagttggtgtggacttgaatggtcccaagtgactacctgtacaaccaaaattcactgatataaaatgggaggaagtggaatatccaaaattactagtcctagtcagcgaaggacaggccccagtaaaggtcaacaccctgtaggcctgagttgccattacaaatcatttctcaggttagtaaatagtggggaaaaaataaaacaaaacattttaaggagttttgacacttctcatattattcattctaatatccctatgttcgacttttgtcaaagttttacataacagaaataaaaattcacaagtatttaaaatgtctcaaatgtgcaaaaaggttgactttatctaccaagaaataggtgcctgaaaccagcaaagggcatcatattgaaataactttctcatttggttgtgagtttcttaaagggcagtccaggtctcaggtcctactaaccagccgagagcagcaactgaattcctataaaatctcaaatacaaccttgaaaagtaatgcacgctagcacagggatctggaccagggagcacaggtcttagcctcagtacatgctccagcaccacatgtttcttaatcttaggtaagccaaaacggtctttgttgttgttgttgttgttgttgttgttgttatggagtcttgctctgtcgcccaggcagagtacagtggtgctatctcggctcactgtaacctccacctcccaggttcaagcaattctcccgcctcagcctcccaagcaagtaggtgggattacaggcaagtgccaccacacctggctgatttttgtattttcagtagagatggggtttcaccatgttaaccaagctggtctcaaactcctgatctcaggtgatccacctgcctcggcctcccaaagtgctgggattacaggcatgagccactgcacccggccccaaactgtccttgatctttagtttccccttacacatggcagggaaaaaaaaaaaaaaaatcaccctttctaagagtacgatgatgaaatacatattgacagtcaaataagtttaatttcttggaaaaaaaggctttgcacaataaaaataacctattttcttcaaaaaactgaataatatgaatacatcacatttactttgccagttcttgatttatagttagataccctgatcttattgggtaagggcattggtattccttgccagcatttattttagctctaccttgccagtggttggggcaagggtagaacgagaggacccaaaggaatgggggataataaaagggattgaagaagggtagagaggcactgctaatcttttaaagaattgctaatctgagatatccctgttaatacctgcccacagactttctttttagcacttgtggagtgggtattttgcatatattcttctcattcttccagatttacactcacagaagagtagagggggcagtttctccaagtcatcactgtttcttttacatagactttcacattaaatgaatatatattcacttaataagaatgaatatatataaatatgaatgaatatttaaaaatatatatcaataaaataaatatcagccttggattacaacataacttctcttagaatatgcttgggagttttataatctacttaacacaccacttgtaaaaataatagagttatttttcaaggagattccaaatttcagtctatatgaatgaaataatacctatccttgccacacactaaaaaaatatcagggaggaaaagagaactttgtcagagcattctctataacagggtcttcattttgcatatttgcttatttttaaccccaactccttgaatataaaatattatatccaaatgctccccctttgctaacttaacaaaccatgagaaggtttctgtttgtttgcccaaatattactagcattgtttgttgagttggttgattagcactgtagaaagtctttgttttgctgatacttttcacatgctgtataagtactaccaggaaacctgcctcaaagtaaattaaatgagcatgttatctctgaaggcctcatacagttaggaagtggaaggcagtcagaaaggggaagctcaactttgtcctcccaattcggagtggaaaaaagaaatccaacaaagtttaaaaagtgggagctctgaaagctgtgtctgctacttaactgtaaagtctcagtgacatgcttttgaaaaagaaaactttttcaattaatggggccattgaaaataaatttagtatttttggtcgtgtgctgccatcttagtgattattttaaatcagcctgagggcattatgggtaaagagaaggagaacagttacatcctatttcatcttctgtctacctatacatgtgatcttctgcttcatgttcttccaaaattccagaatgtgtgctatatttctctttctttttaaaagatatttgtatttttagggctcagaagatataagttacaaacaatattttgaccatattatgttcagtatgttaaatactgggggtggccattttcaagaaatgtcagggttaggtcttcagtctgatttacaagttttctatttattggagcaattacagacacttgttgaaatgtctggattaatggttgaacttgaacctatgctttcaaaatgtcttgggatggaccttggccacaagatgagttgttcctttcaagttgttccagaagttaaatatctgcagaagacacaggctaagagatggggttccctccaaatctgttctcccaagggtttcagcattccttccagctccttggagaactacactatttgtgagtgcaaaaagaacttgtttcgactgcttcaaccatagagactcagcttttcattaacctctttgtctcttctagcattttaggtggaaatattacccagccttataatatttcagccatttccttccttcccccttcatttcacaccttattaaagcataactgatcagaagatgggacgatccatttttctccaaccaaaatgcaccgaagaatttagcaatgccaacttctcctttcacaaaagctttggaatcatttgtttaaatttgacttttgaatcagccccaagtgactgttctttggcaacaaaatatgtaactttatcacagataaattttctttgctcacagttcctggcctggagttgctgtaaggatcatccagacacatgctggaaattaaacagtgtactaccagggtggccgcaattaaattcagacttgcattcaaaccatggcccgctccgcatttcttcgagaagtttgctttctaaagacatttcagaatgtcttttcacaaaagaaaggcagggtagctctgcccaagtcccctaaatcaaggcaatgagaatgaaaagggagagatgtatttgcagcatgccacactagatgttcatctacaggaagatctgaggcttctaatttagggtgttttcttctggaacccaaaggtaattctatccacgccttcacagacagactacaattattatttgaaaaagaaataaatcatgagttctcatcggacatcaacccaccagcatgtgttataaaatggaatggctccttgaaagaaaatatttcctcctctgcatgtagacatatcccccttgacttaaaaatatattttagaattgaaatgctgaatgcttagcaaattctgaaaatagtgaagagttctggactcaagccaaatgttgtatggcttaagggaaaaaatgatcaatttggaataattttttctagatacttacggatagtacaatatttagaaggaagaaaactatggaggaccatttataggtatgtgatatttctaggctaaaactaagtttataaaatgtgtaaatttgttttttagcaaaatcgtttaaagatggagttcaaatttaatctgctcctctgtttctttttaggtagaatcagttttaatcacttgtattgatttgaagaaatataaattgcataaagttaaagtggctggaagagatctccagattttcatgttatgtcaaatgcctatttgaaatactttcctaaaaatctgttttgacggtgtaactctgtaacctttgaaaactttgggagttgtcaggagttggcctgttcatagaagacaatcactcatgcataaatgtcattcaaaagaacagctatgtttaaggtacaaaataacatagtaccaagacttaatagccacacaaacgatagtcaaaccctttttttttttcctacagagcagaaagttaccacagaaatttcacatgcaagcataaatgatctgaaaaagacaatcaccaatttaggttgaaatgatttcaacatttgagcaaattacaaacagcagacctggccttccttacaacttccatctagttgttgcactgaacaaaaataaacaaatggaaagcttgacagatgaataagacttttctcatgattttaaaaaatgaaaatgcaacagcaaagcaaatatcaccaccgaagttattccgaagaaactgcctttggtatgtaggctggagcaaagactccaaagcctcccctcgatctcccatcagaatcctccacttttgctgtatttcctaattttgtagactctattgctgagctctttatcaaaccagtgtgcaataaaaaagcctccaccgttctactaacttgcaattttctccctcctcctggacagaggccactaggaagggaaagcctcaaaaaaaaaaaaaaaaaaaaagaggagtgaaagcgaagaaacaatagacaaccgtggctttgacaatgccttccctcaaccccctttctgctcctgctgtgacacttgcattcaagagcaaggacgtctgccatccgatgcatggacaatggaatgaggaatacaaggcagcggggaagaaaggaaatcagatgaattctgagctaagatggcagggttctcaccttttccattttggggaatttttttgttttttgggtttttttttttttttttgccaaaaataaaaagtctggatggagtcttcccgcagagaagaaataaaaagagtgtttgaattgttggatggttctgaaggcttctgaatttgcaaacgaattttagaactatttgcagaggtctacttgctgccagtcatctctctctctctctctttctcttctgttttatgtcctgctatctccatcatgcctctgttactatgaagactttctgcctgtgtaagtaagtgagagtgtgcattccttaatgtttgaatcaagacacacgtctgcatgcatttctaatctaagaagcctatagcagttactacaactatcaattagtcagcaatagctgagaacttcaacgcctctgaaggaacaaaggtggaaagacaggcagatactccagcatctggatcatgcaacttgctggctacaaataatggcaccttctctggcttttatctgtgtttagtcctcaaatctatgtaacattatgggttattaatgtatccagccacataattagatatggagcatctaagacatatatgtttctttggcattattgggaataaaatgcattaagctgaactaaaaggaattgcctgctgacaaaaaagagtttatcgtatatgtgatctacgttccattttaatcaactcccactagaactgaaattaactatacggtagagttctttgttcatttcagtggtttttatgaaagaagctaagaaaatagtgattaaaaaaggaaagctaaatatttagctgtagaaaagcatataagaagattaattttcctccataaatgaaatcattttggtttaaactcaagcctggattttggttaatgttgagtgggtttgtgtgggggggctgtgtgtgtttagttgcaagtgttgtgagcaccgtcttacactgcatatgtctgtgttaacttgtattgaatatattctgggctaaccacctgaaacaaaataaagacttcttttatctcattttacagaaacctcaaaaaaatcgacccttccgaaaaccaatgctctgcctttcgttttcaaggacattaaaatattgctaacttgaatacacaagaagaaagagggtggtataagtaacagctgatctcactcccttttaaatataaatcatttcaaatggaatgatgtcctttgcatctgatgttatctgtgattttgtccctcttttctggtgcatgaaaagcaatgcttctttcctccgcactttttgttagaattgaaataatttccaagcgagatatggaaaatatcatgaaggttaacatttgtctctaactccataaacacaacagaaagtctcacctgagcacaggtattcacagccaagccgtagcagaagctgcaaaacaatatcccctcatttccctctgctactcattccttttcttgggactatcaccccaaagagcaaaatttttttcttcctaaagaaaatagctcagacaataattttacccctgttaacttgtgaggtaaccacagaagctgagaaattcgggactaacattcaaagagaaaacccaaacaatagagcagaaaaactgagttgcaggaaccgggaatgagagtctagcaagcttttataatgaggagaggtgttagaaatcaggataaagcaagtccttatcaagataaagcaggggtagacaggggggcacagtaacccccatcaaaccctgtcacttaagaaagagaaaattctaacaaggttgaggaagagaaaggaaatggtgctaaatagctggcgaggtgacccaccgtcctgtttgctccttggctcttgccgaggggaataacagccacagcagtgacaacggagttctaatgtgtcaggtgcaacctctgccccgtgctctctacctcccaaaaacgaaagaaaatcatgcctcagatagaacacaacaggaacgagcaggcgccatcgtcaagtcccggaccccatcagcaccggctggtctatgaaagccttgtatcaagggtcccattcaaaggcaacgaagaaccagagacaatggcaaatcaaaaactggcagggtttctggaataatttaattcctcactccagaatttagatgggtatagcaagaaacacaggcgagagctccttcacaccaagacgcgagcatatgcctgcctctctgtggatgtatttttagacataatatcatggggaaggcagcctgtgcactcatcaacagcatttgcttcctaacgtgggtgcagcctctttttcactctgagagtagctgatgagcagaggaagcaatccacatttctcaccaagccaaaggtcaggaaggaggaccccaaaccacaatccattgtctctgtgctcagaaagcattaaatacattttcaagatgtgttccagtatgaggtcatgccgcgtggcaattcgctcacttcctatttttccacaaatgacttattctatcatccaaaagcataaccagaaaaagaaatcacaccttgacaaagacaattcaaacactgtagacgaaggataaaaatatttgacaggacatctattattaataacatgtactaaactttttaacatgtctgttaaaagcaagagacggataatgatttatgtcagatttaaatgtgctttaaaattggatattcttcgcattcacttcaagcttcaaacatttaaaataataaacacacacaaaaatagctcagctctttaaaatgtgattaactagaaaggaacaattcagcctttgcaaacaaattaactgtaatctggtatattcttatctgatctggggaattttcccttcgtgtggaggattaaaaaatttttaaagactcctttaaatttttcatattaaagtagtaatcaaatatgtatgtggacttatctatacatagacaaaattctcaagttaatttaaacttatgagagaaatccaaggactagtaggtcaaaccatcagaaaagaaaaataaccataaaaacaatctttaaccacacaccaatttctagtttcatgcacttctggaatagaaatggactgaatggaaatgaatgaaattaatttttcacaaccactatattgcaaaacacaatcacttaaaatgaagaacaaacagcccaccttccatatttttgagtcagaatttgtttgtgtcagaattacgttttttaaaaatattgtatgtaagtaatctgtaaaagagagttacaggatggattatttctaactctacaaataagcattctgagttttgattttgctttaacaattgaaacagtttacaatttcacattgtaaatctcactaggactgaataatgctctcacatggattgacaaagaaagaaaaattcatgtcagaccaaaaggcttctttcagtcagtttcatgcagctttcttccaacggatctgggccaaaacaaatgtagaatcttgagctgaactatccatcacattttcctagtctttcaattaatgacactgcaatcagatcgatagaatgtaataagaaaagagctttgcatttctatacctattaattcgctgagtaactccagcagtaaaacgtgacctgaaaggaaaaacactcaaggaaaatgaattctcttagcgtattgagcaatgactccctgacccaaaaatgaacactagagtttctatcttccaaccagggttattaagatctaaagatcagattgccttgtcaagagtgagcttattcttttttcacaagattctctgcaatacactcacaccacaagaggtctagtcaaattggccattttttagaattttggaacaaacatctttgaagtgcaggttagagtatctgaaaggaaaggcattgttcttcacttcctaggccaccctgaactaccacatttctgatcttggttttctgtgatgttctgccccaaggaattgggtttagaaagggtgaagcagggaaagaatcgtgggaatgctaattgagcacagccccattccaaattattgcattggtttgagtctatgcaaacagtgacagacataacaatgcaatacgatgtctggatactccatatttatcaccagagacagagaacccggaacacacgggatgagctttctgtgggaaggatgaggcaaagaaaggctggcctgagattatcatgtgcgtgtctagattttaatgtcactggaggttcataaacagtaacttcagtcataaaaagtagactctttctactaaattagggttataaggtagttcaatcaaccactagtgtagcagaaagaacataggttttgttgccagacaaaccagagtttgaatttcaattctatcatatactagttagcacctctgaacctcaaatttttattagcaaaatagaaatattattgcttacttgaagggctactatgagggttgagtgagataacatatgtaaactatgtggcacataatagctaaacctttcccctcacaatccttgtgtttccaaatataaactagcagtaaaaatacaatcttggctgagcacagaggctcaggcctgtaattccagcactttgagagacccaggagggtgaatcgcttgagcccagaagttcagtaccagcctaggccacatagtgagactctgcctctacaaaaaaaattttttaagttagccaggtatggtggatgtgcctgtcgttctagctaccagggaggccaaggtgggaagatatcttgagcccaaggaggtcgaggctgcagtgagctatatgatcacaccactgcactccagcctgggcaacagagtaagatcctgtctcaaaaaaaaaaaggaaaaaatgcaatcttattgtacaaattaaatgaaatagtgtatatagaactctcaataaactgttcaccaatgcacaactgaaggtattattattgttgacaaaaataacaataaagccttaaaaattgaatatgttatttcatctaagacataaagaaatagtatggtctgagacctcccttttttgcaattatgtatttaaatccaaggggaaatattgctgctggaagagctgtatcaagtgaattggccaccagcaaccagtctttcagtgcacgccaatcttagttgccaatggtagcaccatcttttgaaggttaaaaaaaaaaagtacttaaaattccaagatgaaactacaagaagaaatctagcagtgagttggcggaaacacctttgatgagaagtaagaatagcacggctaagtgttccctgtgtttgcaataaaagaggaaaagatctgattattcatttaataagtttttatctatcagtagaatattcataaaacagtataggtgggagctgtagggaagataaattgccctcaaagagcttcaagtctaaataaaaaatatttatgtcataaaatgaaaataattacaaaacctgaagtgagaaaaatactactagtcttggaataaagtttggcagtaattgatgtttgacatctgcagtatcagaagtattttaaaaggacctcttttattactttgtcatgacaatcattaactaatgaaatcagacaatagatgagagagcttaaaataattgctgcaaaatatcaagctttattaagacatcaagttcattacctatgcatggtctggatagaaaatattggaaagcttgtagaaactaaaaaaaccaattcaataggtataattaactgaagaagatatctgctgcttttaggggaaaataataataacaatatctaccacttacagagtacttatacaatgccagacaacgtgctaagtgttttatgtctaacaacccacttaatcttcaaaatatccctaagaggtgtgtactactgttatcatcacagctttacagatgaagaaactaaagcacaaagacggcaagtgacctgcccaagatcacagagctagcacataatacagtcaatttcacacccaggcaatttgatgcctgagcccatgcccttgaccactctcatcattttttcctccttagaacctctttaatctgattttcagtaaaagtgggaccaaatggccgataagctaagtttactgtgggtaaactctaagaaaaaaagagagataacccacttggtcaagtataacttatggtcagaagcaaaatatagcagtgtaaatttattcattccttgagtgcattcattcactcaacaaatattactgagcatgactctactatactgagcggatctctaccccattaaagctcacaggctagtatatgagactgccactaaaagaagcaatgggccaggtgcggtgactcacgcctataataccagcattctggagacgaggcaggaggattgcttgagcctgggagttccagaccagcctgggcacatagcgagaccctgtctctacaaaacttagctgggcatggtagggtgcacctgtggtcctagctattcaggaggctgaggtgggaggaggacttaagcccaggattttgaggctgcaatgagctatgatcctgccactgcactccaggctgggtgacagagaaagaccctgtctcaaaaacaaacgaacaaaaacccacaagtaatcacaatatagggagtaagtgggctgttagaaaaactaacaaacaaaaacccacaagcaatcacaagacagggaacaagtgctgtattagaaaaactagagctgaaaactcagagtagtatttttccatatgagataactgttaagagagcaggttcaggagatgaaaactggctggatccagatgtcccagacaggaacagttatcagtagtattttcatttggtttcatgctaaccacaatcattccttctaatctggggctttggaaagtgtctggggaggggatgcttttttggcactgtgtggcatgtgcaactcaaccaggatgcccttttgagttccctggagatgcacgttctctgcttctgaaacaacttactccagcccaggtactacaaagggaagaaagacacctgcgtttttacctctctcccctgatgctttacagaaatttaaaaagaaagttccataataactcaagagtacaggtacacacattttaataatgttagcatttttcctcatatttcctgatatttcctgattttcctgatattttctttggtattttaataaatttatttctagtcttttatatatgtgaatgtttattcatatttatataatttttacaatgtttggatcataatataaatatttattcttcctattctcttagtttaacattgtatcaggaacatttttgaagtttaagtatctttcaaaaacagtttaaaggacaatataatattccattgtatagatatgttacttgaccattcctccaatattgaacatttaggataatttcatttttttgcactatacgtaagattgtgagagacatctttccacatgaatatttgactgctttccttagtacagattaggagtgagattattggatgaaagtgctttctttttttttttaagtattgctaaatagctttctagaaagttttgccaatttgaagggagttgaaatctcactaggtttcagttttacttagcagtgctttttaatttggttttttaaaattgaattctagtgagattggattgatatttcaagagttcattgatcatgtctcttttttttaaattttgttaattatctgtttgtgttctttgtcattttctcagtggtgctgctatttttttctgattgatttgtaagacacacacatatatgtatgtgtatatgtgtgtttgtttatatatacacacatgcacaaacatacctctatgtatgcacgtatttgaactctttttcaattattgcaaatgcgttttctactttttctcagtttacagaacttttatattctatatatgcaggtgtattgatattttctttgaggacatcatcacatgcttttatatcttgaagtattttttactcaaaatcaaatattcacttatattgtcttcaagttatttatgtatacaatttttgcatgtaatctacctgaaattaattgaggtgccttttgtgaggtgagaatataacttgagggttttgtttccctttcaacaggtaattttcctaggatccagtcctacttatattgatattttaagtgtgacaaaattgtttatatattcaaaactgttttggggccgccacctattccattcagatgtttgtatttaaattctttctagtaaatgaaaccatcaaaacttatttctattttgtcaacactaggactatcagtgtgagagacaataatatcctattgtttaaggattgggccaagttgtattgctgattatggatgtgataagacaactgcaaaaacttgctgggtctcaggaatggccttagtggcaaaggggctgaaatttaattcagaagagttgagattaggacaggagattccaccttaaagcaaccagagaagctagaagtcaaaggggttaatcaaataaaaatctgcagaagaaagccaaggcccagatactgacaagagcactataaattaaagtttgaagagatcagaccaaacttgagctcatcttcacagaaccaggtgacaacaggagccaaggcatctcaaagagggaaagatagaatatggggtggggaggagcagggattcaggctcatcttcttggctagcatggggacaatgcatggatggagagagtgagtccagggcaaggagcaccaatttatttgggcatcttgtttgcagaaacttaacaccagtttatatttcctcaacataatggtgaatttattacagaaagctgacttggataatttaaatgcctccccaccttttttttttttttttttttgattggtacaaagacagagttttgactgaaataagcagagggagatacctgtctcagttcaccttctttggcagtgccagaaactgattcaaatggaaagaatgaaaactgaagcagctcatttaccaggagtgtgctaggtattgaaaataagagagttttcaattctgaaaagcaggtcaatttaactaaacagtactgtcaaaagaagatcacttcccctatctaaaatacagtgaggaaggggctgtaccacaatgatagaaaaacttgccagtgtatacttcctgctgcagttttgatgagccactggcatggcacacagctaactagtcccacaaggccaccaagctccactgtccatgcaagggcatttctgggagtgcatagggagtaatgggtagtggctggaaatgcagtctttagtgtaagctgatcaaagcttgagtctagcaatgccaataactaaccagctgtgtgatcttgagtaatttccctaacctctctgagcttcagggtcatcacctgtaacatgggcataataattttattcacttcataaggttgttgcaacaactaaataacaaaatgcatatgtactatatgtgggcctgattcatgcatagaattcaattaaatattagactgtgttcagaggcagtatggtgaatgcaagtggtagaactaaacctggattcaaacaccagctctactacttgtttattctatggcttcatccctctatgcctcctctagaaaatgtccatattaatacagtgacatctattccataagactgttgtgaagattaagtgaaataatatgcacaggcacttgatagtgcctatctctgtaaagactggctgtagttattgctatcattttagtatccagaatgtaaagctaaaaatcctcaggccaaaagtcaataagaaactgaaaacatgaaataagggaaaatttcttttcctttggaaatctactatataagtaaagctgattttctgagttggttttcccctctctaatggaaaatccacattgcaataaaatggattcctgtggcaatgctagaggcatccagcatgtaatcacagacaaggcagcacctctaaaacagctgggatgacacttgcaaggctctgctgagttcattcagaggccacaggatgtcttttctccagactgtgacagcaggcattctctctcaatgctttcttgggaatcctgtgggtgatttcagagccagcagccaggaaacatctctggctatgataagaatcccaaggagaccttaggtgtcctgattcctagggccatgcagctctacccactcaagattttagttttaaatcctttcatccatccatcaagcatttattttttagtatctaggctaggggctaagtgtggagtggtgaacaaaacaaattaggggccgggtgtggtggctcatgcctgtaatcccagcactttgggaggccaaaaaggtgggcggatcactcgaggctaggagtttgagaccaacctgggcaatatgttgaaaccctgtctctactaaaaatacaaaaattagccaggtgtagtggaggatgcatgtaatcccagctactaggaaggaggaggcacaagaatcactcgaacccaggaggcggagatttcagtgagccaagatcgcaccactttagtccagcctgggcgacagagtgagattctgtctcaaaaagcaaagcaaaacaaaaaacaaattaggtccttgactcatagaacttacattctagtgggagagtcaaacatgaatcaggtaagtgcacaggttaacatataattgcaaattgtgatataagtactgcaactgaaaagaagaggaatgattatgtctatctgtaggggaagaattccccaaagaaggggcatttaagcttatatgaagcatgaagccaagtgtggtgactcatgcctgtaattccagcatgttggggggccaaggcaggaggatcatttgaggccaggagttcaagaccagcctggccaacaagcgaaaccctgtctctactaaaaatacaaaaattagccaggcgtggtggcaagcacctgtagtcccaggtgcttgggaggctgaggtatgagattcgcttgaacccaggaagtggaggttgcagtgagcccacatctcaccattgcactccagcctgggcaacagagcaatactctgtctcaaataaataaataaacaaatatgaagcatgagatataaggagcgccaccagctttgagtataaaatcttcatgaacattggcttggagaaagctgccaccaggttgaagaaattaccaatactgcccaccggaagttacacggccactggtgagcaccacgctagacgaccagagatccctgggtatctgagcttgccagttcttcattaaaggaggcaaaggtgaggcaaataccagtttagtcctgcccaccacgaggaaggaaggcaaagtgtgtagtcatgaatccttttctgtgggcttattcctccttcagcacctaatatgtatgtctcataaaaggggtgcttattggagaatgactagcacaaagctctgtcagtataaatcacagaagctttgatcattgctgaaggtggaggatatgggttataaggtgggcaggatggtccctacaacctgcataggagcagtctccagggagagaaaggaatgaaatctcaattcctgtataagctacacagacattaagatgtttctcccaagccctctattttctaccagtttaaatccagcacattcctcagaagccaattcaagactggcctcattccatgaaacttccctacatcccagagcatgtcgtctgcccccacagtatcatccttccactgcactgtgctgtattgttctcaagtcactcagtgaattattttcttgcccactcaataagatgatatactcctcaaggactaggactattcctttagttcttttgtattccccacagtgctgtgcttagtattgtgcccactctaggcacttaacatatcaatgcctgttgggtaaatgaatggtttaattaatccatatatctgtaagatttcagtaggtggggaaaataaaaagaagtggctctgagtataacaaaattgagccatccctggctggggctggacagttatctttaggagagtgtttaatactgtatattggttcttatttaaacagagggcttagggtcctatatctggagattttcatctgtctagggtaattgaagggcacctctgcctggcaataagcgatggtctaggaagacctttcaaagccctttccatttctaattctgattctgtagattaggatgtgttaccatctcagtccagagagtacatggtgtgaatgttagccagtccttacaacagtccctgaaccatctcctgcaaagatctctagaaactccagacccctttgtgagctctggaatgggagatgcaccccagcccccaccaaataaaagcatattccaggggccaccagagtgcagccattggtttagcctcattaatgctgggcttctatgaaagagtggggaagaaagaggattgttgcataaaactatttgtctaaaaatgaaacaaggaagattcagcccagagtgcagtgctgctttacttccttcctgttttaatggaggtacagcatgaggtaatcttttaagaaagtcttaacgggttggagtaattttattgtacgtttattattattctcatttagaagactcagctattttattcccagttaggattaaagggatcctttctatttacttctaacaagctttaatataaaacataggaacataaaacttgcctctctaaaggcgccaatagcccatcaaatctgatgtcactggttcagaagacactgaaacaaaaggccagtctctgccaagccaggcatctcacacagcccagcagcagcaaggctgccggacaggaaggtctgagcctccacgcataaagcatccatcactccctggactcaccccagcacaaaggactcggttttctcccattaggcagcacggtatgccctcttacagaccccttgtcacactctatgacctcctcagttggtgtggtctttgtttcccgctcttattttaaaataactcagctggcatagcattgaagcccagccaagtttttaatttaaaagttgccactctcttgaaagccttgggtgagtttgctgctaggcaggtgccatgctttaaagctataagaaggcattgtttttgtaagtattgtctacctgtagaattgcttggaattattttgctcactttggcttttctagtctcacttggcaccttctccagtctgtctggccccctcaaccctaaaaccccagttggagttcagtgaaatcaattcaccaatgaaggaagaaagtatttagagacacagagttcccccacgcagcagtcactggcagcataaatcacaggaaactataggaaggggcagcaaaaacccagtgagcttagtgcattatgcattcagcctggaataatgacctctaatttattttagctacgttgctcttggggagggatgccctaatctcactctgaagatttcagaatatttttcagttgttcttcttgcctttaaacccaggaatatggcttattctctatctgtggagtagttaatctactcagacatttccccctacattaccatctgctctaccttgaattttttacctcttcacactaccccagccttagcctgctctgctggctcattcagagatctttaatttctcctctgcctttatgtctggttgcttatgttttggagcagacaatagaggtgatataggccattattcatgagtagcttcaagggtaacgtgagaaatgcctcatctcctgacctcttttagcataagaattgctgataaaattctgaactgaaaagaaaagttcttctaagaaaaaatattagagagctactcactctggagcagcttcctggagaaaagacctgaggtggggagggcatccataaaaatttttaaaaataaaaatgttgcacacaaaggaaaatattgattataattgacatcaccagtttattacaatccatgacagcatctgggaatggcaatgtaaattcaaaagaactaaaacatcatgacagccaacagttgaatgggactatctccaaacctaatagactaggggtctctcataggaagctgagtgggcccttttggtttccctctcctcaccttcattccatcagcctcaggtgagcaatggcatcgcagaagatacgcagtaggagaaggaaactcaactacctaccagcagccccatcactctctacacactctggagttgccagtaagagaaatgtgcagccccagtgaaatgcccaaaactgtggttcttagaggaactttattcaacaattaccatttgtgtggtaaaatcctctggtctctgcagacacagacaaaactaagcaatttctcactgcccattctccctgtgacatcttttccacagctgacgcttcaactctccacttcactgatattgctcatttatattctctttgccatcccaagtctctctccagaatagcaaatacttccaagacttttgccaatggcccccagaaactaaaattcaacatagctaaacagaactcctcatcagtacttaaccctatatggctggtgttgttgatagccaaccattcacccagtcaccagagccagaaacctgggagtcaccccaactccttctttctaaatggctctcccctcccaataaccaaccctgccaaatatatccaaaagatctcaccaatctgagttgcttttccagtgcctttgctgtagtcttaatgtgtgtcttcagtttctcttgcctagatgatggtagcacctaaaaccagcttccagtaatcacactctccaagccttttctacataaacaacaaagtgctctctttttaaaaaaaaaatcagcatgtcattttatgtttgaaatcatgcaatgttactccgttgctttcaagacaaataaatgttcatccctttggcgtggcatacagatttcttcacaatctgactccagcccacttccttcaactcaacttctgccaaagcctcagattctcactgtgctttagctatgtggaaacacttgcattccctggatgttctctcacaattctttacactctatgcaccattccctctattcgtcctgtccttccttcctctggccttttgtctaggtaatgccaactcatcagtcagaacccagttcaaggataactttgccaaactcccctggcacttgagtgcttccttacttgtgcacaccaaagcaccttgctttcattattcacctgaaaaaaaattgttaaatgcttgtacattgtttattttttatacatctgacttacccactacgtgtgagctctccaagtgcaaacactataccactcatattccagtttccctcatgtctaacacagtgcttagcccagagtaggtgcctataagaacatattaaatgaaaatacttgtcatatatagacccagggttaaagccaacgttccatccttccctcgaagaaattctctttctggtctcccacccagatcttggaaaacagcacagtgtatgactttgagcattaacctgagttagagcacctacgtcctaggccaggtctgtcatcaggaatgtgtgagatctggagcaaagcaccaaataaacagccaacatatgttcaacattgattatgtgacagattccctgctaagcatgctacatgcatgatcttttttcctcacagctacctgaggcgacagatgttaatatcatgcacattttacaggtgacgaatttaagtaactcaaactcatgtttgatgccacctcccttcatctgggttatggagagatcaaatgagacttggtgtgtaacacagctctgtaagctatacagatctacacaaacataagtcaccataattatagaaagcaacaaagattgtctaagtgtaattgaagctttgtgattatagtgaaaaataagatgtaaagatttaagccgggtgcagtggctcatgcttgtgattccagcactttgggaggccgagagaggcacatcacttgaccctaagagttcaagaccagcctaggcaacatggcgaaattctgtctctacaaaacatacacaaattagctgggcgtggtggcctgcacctgtagtcccagctacttgggaggctgatgtgggaggattgcttgagccggagaggttgaggctgagtgagctgagatgacatcactgcactccagcctggatgacagagcaacaccttgtctaaaatatatatatatatacttgtttttagaccttggctaaaaataaataaagatttgagacagagcaagaccctgtctgaaaaaaaaagatacaaagatgttataaagatattaagatccatcatcttacacaactgaattcagatgactcagctgaaataagcccccaaatcagggatatattgtaaaatcataggcgtaggaactcaatgtgtccaaacccttctcgttttgcaatggagaaaaagctacacccagaagccgcacagctaatctgtagaaacccaggactccttagtcaaaaaccacactatttgccccagtagaaatagaatatgaggttcagagagtgggactgatagagctgagtgtccaagtcagagagcgcctgagtgtttcagagccaacattgagctcaatacatgttcctgacgtctctcctcccagacgttgtgaatgaacacatctgtccttaccaggcatccaactagtaccacatccaacagccccaacatataaaaaaacagaaacgacatgtgtccaggaaattgagtttaatgaaaagcattaggatgtaatagaaagagtaaagacttttgaaccaaaagatgtgggtggaaatcctaactctaccacttactgactctttggtaattgagcaaaccacttttctgagccttgacttcctcatctctaaaatgaacaaaatgatacccctttattgagggaataaaatatttgcccctgtgttcagtaccttttggcttctcttctattcattaaggtgtgttgatgtaatacatgagccttggccaatttgccaagccacaatataatttcatttttctacttttaggaagtgacaatgtttgtctggtataactacataaaaatgtagacacatcaaagacattaaatatgtttctcctttttcttgtcacaagtatcaagtctacattcagccaacatgagtgccaagaacacccttattgaatgatagatttagtgtgtggtttagtgatgctaagttctcctgcgtgactctcagcagtctaaaaagaatgatcaaatgtggggaagaaaaattaacaccagcttaatacactttcatgccatatcctactgcaggtagtgaataagagtctgggctctgaaatcaaaacaacatgggttcaaatttcactccagtatatactagctgtctggtcttgggcaagttacttctctttagttgtggaattttcttaccggtagaatgggcagaataatagcacctactttataaacatacgatgagagttaaattaatggatgtaaaggagttagcaccaggcctgacacattgcaagagcttaataaatgcaagctgttgtcaatacttactttagacgcattgttaagtggggaaagaaagcattaaaataaaagaaatataaacctaattttattgaaagagctctgtttttgttatccgtcagttctcctaatttgatagttggtataaaatactatcgggtgctttgtatgaggaatttctcaagaaggtaccttgttcagatgtccttccacatttctcaaattccatcatctaatgctagtctatcttcatccattatgaagcctttaaaatatgacctaatgccactgactcctcgattctatgaaacattcctggaatcaacaaggaaaaatggcattttgttccaatgatgcctaatttaataatgaagttctaaagactactccactcattcgaggccccatcaatgcagtttccttttgtagccatacatatttagacaatgcctactacttcctatttgaagcagctgtagatttgtgaaaccagcactcaaattggcatcaggagatttgaagttcaaacctcgctctctgctcattttaactttggtggaggtgctttatctcactgagccttatcttcctgatgtgaaaatgtatataataacatccatgtaatggaatatattcagctctaaaaagaaatgatctatcaagccagaaaaaggcatgcaatcgtaaatgcataatgctaagtgaaagaagtcaatctgaaaaggctacatactgtatgagtccagctatgtgacattctggaatagacaaaactatagagacagtaaaagatcagtggttgccaggggttagcggggagggagggatgaataggcagagcatggaagatttttaaggcagtgaatctattctttatgagactataatggtgggtacctgtcattatatgtttgtcaaaacccatagaatgttcaacaccaggagtgaaccctcatgtaaactatgaactttgggtgataacgatgtgtcaatgtagatttattggttgtaacaaatgtaccgttttagagggggttgttgatggggggagtctgtgtatgtgtggcgacagtgggtatgtgagaactctctatactttccacttaatttttctgtgaatttaaaagtactctaaaaaataaagtctatttttttacaaaatgcatgtaaacttgctcacagagcatctagaacattgtgtgtgctcactaaatgtcaactgaatctaaatgttccctctacatagcctgctggattgtaaattccaagaaggaaggcatcacatatgaccagagcattctagaaaacacctagcagaattccaaaaacaatcagtcacaaaatgttcatattatgaggataatgattctgtcataattttgcaggctagactgtactatctagcctatcatgcactatcttcttaatctatgcttcttcaggaagcgtgcctttttaaaataattaagacaatatttttaaatgaattcacttgtcactggtgcacacacagacacacacacacatatgaaagaattaaggctaggattagtgagatgagtgaggtacttgcatcaagtacaaataaaggtggaaccaaaaatctcagtaaatccaggtaaataatgtattgcattaaaacatttttattactttataaaaacatgtaaaaatacattattacgttattacatttaatgcgatatgtattataaaaaacatgattcatgcaaaaaattcatgatgaatacaatatctttttttaatacagaatcaatataactaattatttccttttgacttagttttcaacacggcttggtccagcactaaaatgacactgaggcacctgccacagattttcactaaggtaaaggttaagtagctcttcttcagtggcatcaggtgcgtcagtggtactagatgcattactggccctttcttttgaagaccagacacttcctaacaatgtccagaattattctttaacctttcaatggtgtccattagcaaacatgttttagagggtgattttaataagacactaaaacccaaaagccatgaaactgtctccaatttctcactccagctcttactctcctcccataatactgtggaatagtttactggcccctgtaattatattataaccaagataactgtactcagattcataatatattctaggtttttgacttggccgaagggacagtggcttacctaagcatgagtgctgaaattaaatgaatggcagaagttcgtggttctctttacttcctaaaacatgatgaaaacagggacaaacggggaataggtaagtgtgagaatcagtatgttggggaggctggtgggaggaaaagtttaaagggagggtatcagagaacccctatgatctcacatttctaaaggataccttgtctcgtttgtaaacaaacacagtcctacaagaacaatttgctaacccactctccttcctgtggagatgattcgacattcattcacttgatatttcctgagctcttgttatgggcaaggcatcatgcttcaaactattcaggacacaaaggaaaagtattggtgtgcaaaatgcagcactggggttcctaagacttgcaaactaatagaaaagataacatataacaagagcctctttgcagtgtgtaacactttcacataaatatcattttcacacttgatctttatcctactctaacaaaggttagctaggcatccacaccctcatttcaaaaatgaagaaatcattccaaaaatggtgacactagagctacatcatagctaatgctatgtcttctttgatatgaggcagtagatgacaagtttgaagtgagtaggataaatcacctaagtgttgcagattagaaatggtaggattacttttgaatggtgtggtacaaaaaggaattacaaagtgggtgcgaaaaaaagagtaaggccaggcaaaagaacacggagaaagagtggtagcggggaggatagaaaggaagaaggtagacatttctaagcaaggggaccgtcaccggcaaagcatagaggtaggcaatcaccaggtgccttttgggatagtcggcaatcagatagctacagcataaagttttgcttgggaagtggtgttagacaaagcagcaaaataatgtcatggagagactgggaagccttacatatcaagctaaggaggttgaactttattgggtagagaaaaaagagattaaatttttacatagaaaagtggggcaaatgttaattttagaaagactaatctgcttatacattggatgcagtgtggtttggtggagagatactattctgaatcaaagaaaacttgttaagaagccatttcaggggtctaagtaacaagatcctgacttagtgatggaaatgaagaaaaataaaagggagttggtgtcagaaaacctggtttcaattctcttctaccttacccatttccaaatggacagtggaaaacaaatgctgacccacttttcgatgcatattttaactaatcaaatattataattcactacatgccagatgctatattaaacatcaagataccaaggtgaagatcagtccttgcctttgaaaggaccacaagaatgagaaagaaagagcaaccagatgtcctgggagagtcagggaggtcttcatagaaggatagatgcttgaagtgattcatgaggcatgagcagtgctatggataaaacggtgtccctaaaaattactataatatgttgaaatcctaactgccagtgtgactgtacttggagatagggctttcaggagaatgattaaggttaaataaagccataaaggtggggtcctaattcaataggattattgggccttataagaagaggaagagagtgggggtgggagaagagagatcgctgaacacacaccaaggaaaggccatgtgaagtcatagcaaaaaggcagaagtctacaaaccagaaagagaggcctcaaccagaaaccaaccctgacagttctcgatcttggactttccagccttcagaactgtgagaaataattttctgttgttaagctgcccagtctatggtgtttgttgtggaagcccaagctgacaaatacaagtaggaagtttctgaggcagaatataaggagtgagtatactttgcaaagagggaagagggtggaggtatgcagggaaagagaaagagataacatggaaagatgtcaaaacaaaatggcatagtgcattttaagaattccaagtaacttggtaggactgaaataatggtggatttgaagaaatgagaagaagccaaataggatagtgagaagaggccatattgttcacaccaaaatgttgggacttgttttgggaaaggaagtgaggccattttaggatctttagcagggcaatggcatgctcagagaaatgtctcagaaagataattccaacaggagagtgaagaatggataacaggagatcaagactggaggcagggagcttattaggggaaatttatcaatcatccagacaagagcaaatgagaaggtagggctgcagaagaagcagtgactaagagtgatatttaggaggaagaatcatccactccttaaggaacattgcaaaatctgctaaccacggaagacaaacaccttttaacgtgtctgcccacttcaatcatctaaagtttcttggaatttcctaaaatattgccttgactatctgcagccagacctggcctcagaggaaaagggggccatggccattgactaacaccatttgccatgggtgtgtcagtgaggagtggtgattgacagagtgactgccaatccactctcctttggagcaagattaacctaaaacaagatacattaacacaattcaagtttcttttaaggacctctacacaagaaacacatgttttgtcataaaaagcattccagggcctcacaatcctgattgttaaaagaaaagcttaatctctgaaaattcttcttccttcagatttcttttccataaggaataattctcatctattgaatctttccttcagagccttattcttccttgtcaacagctttcttggaagattacagctgctgctaaccagttagatgtctccctacccgttcaccccgaatccttcctttcttcctaagtctatgagaataactgtgttcacagtccatgccctgtgccctctgtcctgctccacattgacaatggtctgactatgaaagccctctacctccttgcagcctgatcatattgctagtagcctctggtctccttgtgcttaccacacatgatcatggcctgctatggggctagctaacctcagctagaattttccctccagcttcctctctgtaatatcacatccttcccctatttccaagctaatattcaagatttatttttctgggtaagactttcttctaagacatccccagtcaacacacacacacgtacgtgtaatgtaatgctgttgcattatcaaagccacacctctcccacagttataaagaacaggattacttaatggttaaaagcttgacatctggagtctgatggcctggatgataatcctagatctgcccttcattgagccagttatttacaattgctgtgattcagtttcctcatctgtataatgtagatcataatagtagagtatccacctcattgatttgtcgtgaaaattgaatgagttaacatatgcaaaatgcctggaatagtgccaggcacatgactggctataaatgttcctagtattattattgctatagtgcagtggttaagagcagggtgttggacctctctgaatttcagcttctttatttaaaatatgaatggaaaatacctattttataagcttacatgaagatgaaatgagatcatgtcaaagattttagcatagagcaatcaataaattgcattattataattattgtcattataactcaatattgtccacatactaaatgaacttgtatttattttctaaaatgcccagactgtcagaaacctcagagactgttgacttcaatctcttcatttgcacagggacctgtctaatagaaagttgacatgacttggcaaggctgcacttccatatggtgagtcagaactagaactcagtcctgctgactcccagaccttcttcccaccacatcacatcgcatggcacagtttgtcttttttctcctctgtgtgctgtgcaaacccttctcaacagcacagtgcatacaaactagaactctttctttctttacttgtaacttttattgtaggtttggggtacatgtaaaggtttaatacatagatatacatgtgtcatgagggtttgttgtacatattattttatcacccaggtattaagcccagtacccgatagttatcttttctgctcctctcctgcctcccaacctccctgctcaagtaaaccccagtgtctgttctttccttttttgttgttgtttttgtttgtttgtttttgagatagagtctcactcactctgtcacccagactgaagtgcagtggcaccatctcagcatactgtagcctccaccccctgggttcaagagattcttgtgcctcagcctccctagtagctgggattataggtgcacaccaccactcccagctaatttttgtatagtagagacggggtttctccgtgttggtcaggctggtcttgaactcctgacctcaggtgatccaccgcctcggcctcccaaagtgctggcattacaggcatgagccaccttgcctgacctgttatttccttatgttcttaagttcttatcatttagctcccacttataagtgagaacatgcagtctttggttttctgttcctgtgtgagtttgctaatagcctccagctccatctgtgttcccacaaaagacaagaacttattctttttatggctgcatagtattccatggtgtatatgtaccacattttctgtattcaatctgtcattgacaggcatttaggttgattccatgtctttgctattatgaatagtgctgcaatgaacatttgtatgcatgtgtctttatggtaaaataatttatattcctctgggtatacacccagtaatgggattgctgggttgaacggtagttctgcttttaggtctttgaggaatctccatactgctttctacaatggttgaactaatttacactaccaccaacagtgtgtacatattcccttttctctgcaaccttgccagcatctattattttttgactttttaataacatccattctgactgatgtgaggtggcatctcattatggttttgatttgtatttctctaatgatcagtgatattgagcttttcttcacatgcttgctggatgcatgtatgtcttctttacctttgaagttcttctgtgtccctgttcatatactaaatcctctcgcacacacctgccaaagacgtgctacagttctcagtgcacagcatgtgctcaagtatggcaatgaccttctttaatattttaacatttgtcctttgaaggcttatcataaggaatctttatatatgtgtgactatttgtaatgtcatatttgtgtctgtgatgaaaacaatggacttattcccgggtgcagcatttgattttccctatgttctggctagcagtgttctattaaacaatacactgcctcccgtctaaagctataaaagaggcatacacaataatcttaaaagcaggcagggctggttccatgtcatttgtgtagccaaaaagttcccctcagctgccacaaattcagtagaaccatcaaaggtaagttctgatcattgaatagtatgtccaacccaatccagtaatttacagccttctagggtaacacaatccctctttatcagattcctcattattcccagtgtcacctgcacccttctgcactatgcagagaaggtagtgtgattcgagtggagtgtccatgtgatgtgtttcattgtattcttttcttctcttctgttctgtttctttcccttctctttcctttcccacctcattctgtttttcacttttttcttcttcatttctttctttctccctccctcctttccttccttcctaccttcttttctctccctccttctctccctttcttcctttcttccttctctttttcccacctgcctgccataacgatcatgtcttgcctgaaaggacaatgattaatagcatttccttacatttgtatagtttttttaagtactgtcctctatccatttcaacgatttcctttgtcgtctcacttgatccttcataccagcccccatgaaatgaagcagagcagccatttctaaaattattgaaaaggaggtcacgcaatgagttagtaacaaagccaggacaatgagccatgccactcatttgtttattcattcattcatttattcatattgagttctgcactgtaaaattcattacaggttcttacagggagtcagacttcatgcatgccagagttctgtaccagagggcctcaccagtggcaggtgctcccgcccagcacggagaagtcagtcaggtgggacttttcatgacagttactaagaagtaggaaaggaatgtctggaaaagtgcagacattccatgtttatcctaattccttggtgggaccaaccagaggaaatgctaagtaccctcctgtctccagtaaccctcatccagccggagatcctttatttctccccattgtctctacatatatctattacaatatgcacaacacttcaatccatttatttacatacttgtttatcttgaacagctaaactactggctcctgaacattaagacttagctcagcacccaacacactatgtgtgggcacctagacatttggcgtgagtgaattaatgcatgaaattcaggattgtactatagcatacttcctccagaacatagcaggaacctggaggcagaagggccagtgcactgactgcatcggcctctttccttctgcccctgaagtctacactgaatgacattgggtcgattttcctggtcagacttagtaagagacttgttaggggcaacagcagaggagggcttgatatttggctctttgctgatttggagacaaagaggcaaaggggaacagttcttatcaaaacatttaattatctagactctcctaagacataaattcttcctgcaaatatctctacatgctttaaaaatattcagagtaacaggtttccacttataagttatgaagtttaagaatggttaagtactctctgtagtctgaaaaaaaatagcattgcatctaaaggaagctaactttctctagaagaacaattttaacagtgggggaatctgtccccacacttgggccaatgtttatgacaaaccatcaagctcattaaaactcccagagaagaaagcaaagaggatggtacttggtccttgattaaggttttgccattgaatccttcaacctcctaccactgcttctagctgtcagttccagaatttgaaacgcggtggaagaggctagtgggtgtacagaaaaaccttccttgtgaagcagggcagtttcctcacactctgaccacaatcaaataccattaacttacaaaagacacaggctgcaaagctgaagagaaggagaattgtattccccgagacagcctgaaacaggcaaaaaaaaaaaaaaaaaaaaaaacagggagagaacgcaaataagactgcctgtgtgttgaagccccaggagaacagaaaaagatataaattataaaactgtttatacttaatgcacatatctctccagatgaggcagccctaaaacatttccacaagctagtgatagaggaaatttttaaaaaagcaacttttgcagaaacccgcaagtgagtacttgatcttgctcaatttcaatttgtttctttaggaacttttttccataaacgcaggcctgggagccgagcagtacgtgcagagggcccatcttctgagggcccagggacctccatgttccattcccatgccaaggaaaacacagacggagaaaatgatcacctccagaggactgcttttcatcactgtactccgtatcaggagaaagtgtgtgttcacagagaccgagggacccagactgtatactgacatctgccttagaagggtccagggaaagttaatcagattttcttgagccacaatttgaccaccaactcaggtaggaatacctgagagttttaggcactccttacattcaaaatgatggtaattttgtgtgctttcattggcacagggtctccatcagtccaaatcccaaaaatgacatccctacaacagatggttcaaagtgcaaacaactttgccagctgaagtggtggaatctttgaaaccaaggagcaaaaaaatcatagaaacagaattctagagctggtatggtctttaagaaatgatccgggtcagcaccagcatttgcaaaaatagtgtctaagtgttgcccaagagatgagtattggtctaattgtaacagtcttttgcagagtgaaggtaagagaaattcactttctttgctctactcttaggcacagtgtgtatcttttcttagataagcatagcttggaaaagttcacacaactgggattgttcaaccccacagaaccagccttgttacaaagttccatttatggctattaaatcttttttcttgatatcaaacagaacagggcaagcaggtacccaaacagaatggctttaaaagataaataaaataaaataaaataaaataaaataaaataaaataaaataaaataaaaatgaaaagatgtttgctataaatgaatccccaattctgtaagaaaatactaagagaatgttctttagaaggtcatgggatatgtaagtaataaagaagagaaaaatgttttaagaaacagaataaaggcatgggaaattgattgtcaaagcattatttgaaagctttcttaaatttagtataatatccaacagaatatctccttcatggtgatactaatctctctttgaaaagaatcaacacaaaatctcattaatttgagtcacactatttcagaattcaggataattcaaaccagacagctaaacttacttttgtaagttactgccaggtctctttaaaaactcagtgccaacaggaaaagacagaaaaatagttttagcactttacaaacatcaacttacatacaaataaatataatattataatttttatacatacatgaaaagttacatgaaaattctaaatggcaacactttgttaattctgacacagcacagaagggagcagtcagtttttccctggaaagacctgatttctgcattttccaggccgttttctagctgtgggagcttggggaaaaccacctgatctccctgggtctccgtggcttctctataaaaggacagttattttaataacacgtcaccaaaggaccagaggctttcttgagccctccagcttttaggtctctgttataactttcatgtaaataccgtgtgtttttcttttagatctcctctttagttcaaatttctttataagtttaaactgatccatccacaaatgaattcaaatgaacaagatttttttgcacaacacacatctttcaggctacaatctgaaatatatgttgaccaaaggaatatatttatcttcagtgctgctgtgagcacaaacagaacagcaaaccaaacaatgacgatggatgacgatggtgatgatgcacttgcttctcatctcgttcatttctgtagcagtctctgccttttggagcctaatgatcatggaactaaacagcgatggaatagcagtccgtgctgcttagtatctgtttctttgctatttcataaccaacttgtagtttactaaaaaacttcttcataacccagctcaggttatatgactaattcaaatgagaccttgaagtcaaagtatcctgtgtatatagtagtatatggtgatattctcacttgaaaattaataccataatattattgttatctctcagagaggagagcctcaacatctaatgaattatgacgtaaataagaaaaaaagggaggaaaacacagtatgggatttaagtcacaaaaatgattttagaatctaattgctatttacttaactgaatttgttaactatgtggctttgggtaagttacctaatctctctatgcttcagcttctttactcatgaagtgggcataattattcctaattcatcatgaaactgaatggctacatgagataagggatgagatagtgcctcgcccgttatctgccacagaggaagtatttgtaaatacttggtacttccctttcatacagacattcgttagcccaaggaatgcaaaaatattcatctttacctgtgatagacagacaacgattctcacttaaggctttttataaagagaaagtcattttccgaaggttttccattaatataatcagaagaatttcaaatatccataaaacacagagacaagaaaacaagtttcttgactgttttcagccctggctgttgatattggtttcactcccgccactcccaacaacttgactgttgtctcctaaagcgcaggcacagggacttatcttggcgtcccctgccaagccttgcagaatcctcacatggagtatgtgcgatgtgaatatttgttgagccaaatttatctcaaaattcttctgtccatcaagacagattgtttttaactcatatggtatttggatacaaaacagtcaactttcatgacccctgatgggtcagcagatcagagactgcacaagaaaaacacttgacatctgtgaatgccaactaagatattcatgtttcctggttctgtcaaaatacccttatctctaagtagaaagaaaggttagtattctgaaggcatgtcagaggtttcctatttaagtccctccctagatcacagtgagcattccattcactggtgacaaaaagactggtactaatttattatagaattcttagcaaccaatactttaaagagtcatgaaaaccacatgttcattcccttggcctttcaagcacccacttccatggggaagagcttttgccctcagccaaacgagtaccctttcttttacaagtatcatcataatttatattaatgaaattttgacgatgtttgaagattgttcattgacttaatagaggtttgcataactaccacatgccagacagtgttctagatgctgatgcttattagtattagtagtatgaacaaagcatctcccactcgctaccccccccacacacacctgctctcttgtactatacattctagcatcggagggacaaacagtaaacaaagaagggaaatatagtaaatctgatagcgagaagtgcttagagaaaaaaagtagggaagaagcttctagagaacagaggggagtcaggtcttgtaaacgtcaagattacagaaaaacataacaaagacactgaacttctatgcatatgttcaccctacgatggttataatagtaataattattattatatattaataatctttctagaaaatgtaccaactaagctgatatataagaataggcagaaattggactaacgataattaggctaatgataatatattgatcaacaggcactcagacaagcaattccatatgttatcccatgaatcatcacaatatcccataaatcccatgtgttatctcatgaatcctctagggaggaggtagtgttctcttttaaccaatacaaataaggaaacagcacaatgaagttattggcctgatgtcacaaacctagtggcagagttgaatgtgactccaggccccaggctcttgacactaaactgcccttagccccaagcccgatattgatattcaacagatttaaataaatatctccaagaaatataaagaataccttattttctaaaagatagaacatatttttgatgttccacttctagagagatttactaaatttaatccgatcactttgctctaaattacactaaattgcatgtgtgtctttcagggcagaaagtacccagtattccataactttgagcattcttaagtttctgcatttaaacaaaaaagttgttgtaatttatgaaggcaagataaggcaaacctgcagtgtgactgaagaacaaactcaagagtaaagacacacaaggctgattagaccaaggttattggcaaagatttgtgaggactagaatctgagcatgtcctctgctccctgagcttcacaaagcctggactgccaactcacaaacaagagctggggtcctaggaaagagtgagtgaaagtatgtgggctgacatgaaaatacacccctcagcagcagagagcaaggcaaaactctcaaattccatgctatgctaaggcaatttaattacattttaattatttatatcttgctttattccagaaacgataagataaactagatgtagaagagaaaaagaaaggagaaaaatatggataacactaaagaatggagacaggaatggagccaatacagaaatacaggccaccaagacctaaacatttgcaggaggtgttgagggggtaaaaatttagctctaaactggctggcagccaatcaaagaagaaaacctaatcagttacattactcagtgtctgggagataaaatatgtctgttgtgttcacataaaaggaaatgttactaaatgatattccagctccccacaaagaaatttccaattgataaaaggcagaagacagatgagcttcatcctgcacaaaaagggagacaagatggagtgggcagattatgggctccttcctctacagataatcctgattgtggtaaggattaaatgacaccatatttgtaagcgcctggtaggctctaacccatggtaggggctcaacacatagtggtcattatgatgaagatgaagatcaaaaagaagatgacaaagagaaggaggaggaggatggagacttcttcaagactcaactttagcaattactcattaaataatcttggggaagtcatcatgtctctgggcctcatctataagattggggaatattatctatttcatgggtttaatgtgataattaagttagataacatgtgcacaagaattttttaaatgaggttatgattgctaagcaattattctgtgatcactcacacagagccatgcgtagctggccctgagtgagtgttttctttctatgatgatggagacccatggaggtaaaactccctactctttgcactgtctgctgtagacacatctgttctctgccatctaaaggctttcacatgtactattccctctgccttgagcaatcttcttctcttgccacccttcacttaaaatcacatactcttcattcagggctcagcccttctcccagacagtcttctctgcctttcttgactgacttccatgtatctcacactgccctagttgtctctggtcataacactgccttgcaatattcagtgctcttgtccagaccctgacactggaccacaaactcctcaaaggtagagaatatgtctcctccttaccattgtagttgtgacatgtagcccagtgccaacacatggaaggaattcagtaatattcattgaaccatgaaaaagtaaaagtggattccaggagaccagtcatgtgattcttcctttttctcctaaggtactgtgatgctgaactgattgtcattctttcttgcactgaagatgtagcatccacactctcaactagaattaacaagcgctagaaattatacttaaacctgtgctcattcacatttcaaagccatcttccagaaagcttagcaacacgaaaaaaaaaaaattgtttagatctgaatatttttcatctgagagcatttagaaaggttcaataagtcagttcaacaaatatttatcttgaaccaagtcctttttttctaagctttttacaactttgttcggttcaaaagaaatgcaatcccttatgttattccttcatttgtttataaatcattaatatgatggtttgaatgagcttttaaagatgaaaaaaaatcaccctttcatagttgtttaaagcagctttttctgttaaatatggaggtcattttttacagaagagaaaccgaaatataccaagatactgttgcctcctaatttgtaccatttgaagtaccaaaattgactaaatacattttcctattatgtttctacattttcaagatgtacctaagattgcagtgggccattcaaaactactcagcaagtcagctatgaaaaccttcagacgttttccagcaaatagtgaaaggacattaaatgttttggtcatctaaagaaacaaagagctgttgaatggaaaaataaaattacttgggctactcagtgaagctaatacccaacatatgacctttcttcacagccttattaatatctttcacatcacaagtggtgccagaattgaatagagagactttaaaacaaggctgtttataggcaataagctattatcctctaggacttagcgaactggctgtcagccaaccttatatttggatactcctggaaggataaaatatgacagttaattggtttatgtgagaagagtaaaatatcttaaacaaaaatatagcccatgccagtcaaacgctagggaagattattttctcagaaaaccacattgacaatatcagacacatggaagcagaatatcttaaataatagttaataatgtattaatgttttatctgggggttctctttctccctttactcactggctagaagcctgtacaattccttcaaattgagctaatctgtaggtactccaaaatcactgcagttgatagataaaaggtcttacctaatatattttacaataaatacccacatggtaccctgaatccatgctaaattgatctatctcatataggcataatgtgtaaaagactctagtggtcaaatgactcaagtcattttgcagctaagattatttgtcccctgttacataacagggggttattcatagaggttattcataaacaggttattcatcgagttaagtatagaatgcaggtctcctgacccttgccccaggctctgtcaactgccccatctcaagtcttcaaagcctacttcccatgagtcaagagtaactcactgttctgaagctgtgttaaagcattgtattactctgttctcacactgctataaagaactacctgcgactgggtaatttatgaagaaaagaggtttaattaactcacagtttcacaggctgtacaggtagcatggctgggagacctcaggaaacttacaatcatggcggaaggcaaaggggaagtgagcatgtcttcacatgtcagagcagaagactgagagtgaatgaggaagtgccagacacttttaaaccatcaggtcttgttagaactcattcattaccatgagaacagcaagggggatatccgcctctataatcaatcaccttccactaattgccttccttaacactgggaattaacaattttacatgagatttgggtggggacacagagctaaactatatcaactatctacaatttgcttgataaggaacaatttgtacacattcctgagtccacccagaaggagtgaagtacagtctgaatggaaagtgtagtggaagaagtttctagtagcaaaaaaggggactattctctgaaagctttgtaattaaactaaagagaagaaacaaaggtacagccagaaaggaagccctggtcatagaaagtaaatagagtgttcactcagaagaacaaggttgtgtaccacaactatggccagtaaactcagtggagaagaggacttaaacaatggctgggaaatgtagaggggtcacgaatcctaaaactctggacatgagatagaatgttcacgtaatgaaagttccgtgcatctcactggtattggtggagaacaggatttcctaaaggaggcaatctggccagaacatactcatttgtccctgacataaaggaacctccatttgtgttcacatctcatcactgtgattctgtgatgaatgcatgatccctgcatcaaatcccaacttgaagagctcctgcttccacttgcagtttcaggcttgccacggttttcatttagccctcgtctctttatctactgaaaagattaatagccaaacaccagtgagaccaagaccaaacactaaatctaagaaccacaggcagaatggagtttaaggttgccaagccaggcatttggagatgggctgagattagacaaggaaaaaagccactgaaaaaaattaatgaggatatctttgcagtgagtgtttaggctagaatcaggggacagaggaggggaaggtatgcagtggctggctgagtatagctggcatgattggcatgcgaaagacacaaaaagagaaaatttttatttataatcactctttttgttgttgttgtttttgagaaggtgtctcgctctgtcacccgggctggagtgcaggggcacgatcttggctcactgcaacctctgcctcctgggtttaagcaattctcctgtctcagcctcctgagtagctgggactacagtcgcctgccaccatgcctggctaatttttgtatttttagtagagacggggtttcaccttgttggtcaagctggtctcgaactcctgatctaccctcaggttcgagatcacctctcaaactcctcaggtgatccacccacctcgacctcacaaagtgctgggattataggcgtgagccaccatgcctggcctatttataatcattctactctatattttcaaaagatatttgaacatccattaggctaactgctatggatagatgccttttcctttgtaatctacaatcggataatgttttcccaatttgatgaatattcttattagttcagagaaagaaaataatatgtttgattctataccttcaatggccctagtaatttccagcaaagaattctaaattaatccaggaagatactgtagggtttctttcattgtatttccttccaaaggtagtggtggccctgatgaaccacaagctctgtgatgcccaatcactttacctctccaagtccctcttgcatcatctgcaaaattaaggcatcagtttcaaagacctctccattctcttctactctaacaagccataaatctcggaatatattctgggtttggcccgagtacatctttacgtagatattttatctatcttgctacaataacaaccacatgccccagatgggaaaactatgctggaaaaaacccaaggctctgtcagcataatgcatgggtgtggtgaagacaggcaactagattgtgtgtgagtcaaaaacatgattagaaaaaggcagattctgataaacagctcaagctcatggaatgtagctaagaaagacagcatataaaatagtccattgatttagaatgtcacaagtcagagagggtagtaaaaacaaaataaaacaagagaagggaaaagatgcttttagagtgacaatacagtgaaacatcgctaaatactgttcagttattgatactaagcctacattttcatttaggtggtttttaaactttcttagccccagaatttgtagtcaaatcacaccatcgctcacccctctcaccccaaaatgaaattctgcattatcctgaaatgtgtgatttgcatttgagaaaattttgagtttttcaaacatgggtttgaggaaaacaaaaatggaaaagaaacatcccttctaattatttccactctaaatatttttcttaaaaagaggatagttgcttcctatgtaacaaacctgcacattatgcacatgtatcccggaacttaaagtaaaatttaaggctgggcgccgtggctcaggcttgtaatcccagcactttgggaggccgaggcgggcggatcacgaggtcaggagattgagaccatcctggctaacacggtaaaaccacgtctctactaaaaatacaaaatattagctgggcgtggtggcgggcgcccgtagtcccagctactcgggaggctgaggcaggagaatggcgtgaacccaggaggcggagcttgcagtgagctgagatcgcgtcactgcagcctgggcaacagagcgagactccgtctcaaaaataaaaaaataaaaaaataaaaaattttaaagatagtttcgaagaacaccaaaaccttcataatctccaccattatctaaaaatttgctcataacttatttcagaatttgaaagtacacagaaactacttctcccattacatgactgaacatacataggttcaaagaagtcaagtaacttgaccaaggccacacagctgaaaacaggaacgtaatcgtccgggctgcaggtttctctaagtcttagactacactgcctcgctcgcctcttgtttggagtaaaatgctaggcaacaaagctcccatgggcagccttttggcagaaatctacttctgttggggtgaattgctgaaccccaattgctaagaatagctgaaagcaccttggaaggagtgctggtttctaaagaaatccccacttaaggagtgtgcctccttcccctcagcccatctgtcgttatgaatctcgagtaacgcatcagagatcattcaatctatggaaacatattgaaggtattatatatgtcagagatatcttctttcatatttccattaaaagctcccagctatgccaaaaatgcttcattcccaaatgaggtacatttcagtaaacgagatgacggataggacttaaagaatcctctaaggaagaaggaaagttgcaaaaagagaggaaaaacttgccaaaaaagaaaaatgcaggcagtttcataagaaagggtttcttcctttaatgatacactatctttaaggcctgtaacctgtgaagtacaactttccattcatgtcacctttccaagcttctatttctaaattagatagcaaagatcagtgggccaaaaagtggacagaaataagtctatgtggatatgcatgtgtttgtgaacacacgtgcacaagtgctcctgtgatcatgggatgcattgtttattggaagaaatgcagtgattctaaaagtgttcatttccaagtcttttcccaatttcacctagtggcctcagagttgtacgatgtacatttaaacttcaaaggatctttctactttagggaagacttttttccaacaaatatagtttttttaatttatgaaattcccagtctgtttcagatacaaagtgagaaactggagatgcagttgtgaccaggatagaccaactcctgcccacatttagattttattctatcaagaaagtcttaaacacatctttaggacaacttgttacacatgtgtcaatgagatctaaagagagtgcccaagtcctagagacatggcagggagcagctaactcattcgcatctctaattctctagataacctcaacacttacaacttggaatccttgcaaggtccgaggatatctgtgataccacactgccagaaaagagacacaacaaaaactactggggtgattcttcctattcatttgaagctacccttgtcccaatgctttagtaattaccaagcctctagttactgttcagttatgaagttgcttgacctcactctgacatttgctaatgaagattattcttatatatacacccaggactccacatagtacatactcaattaatatgatgtatgattaaaaaataggtaatactaaaaaaatagaaatctgtatcatagagatgcaacatagtcataatacattcaatttttttttttttttgagacggagtcttgctctgttggccaggctggagtgctgtggcacgatcttggctcactgcaacctccgcctcccaggtttaagcaattctcctgcctcagcctcctgagtagctgggattacaggcatgtgccaccacgcccggctaatttttgtatttttttagcacagacggggcttcaccatgttggtcaggttggtctcgggctcctgaccttgtgatctgcctgtctcagcctcccaaagtgctgggattacaggcatgagccattgtgcccggccaatacattcaattttttaattatcatttagttttcatagtacagttaacactattaaaataaatgaatattacatgcgattttataagcaatccttttccttgtgaattttatcactctacatattcaatactcctttaccctccaccttcatggaaggtaattcaatggctttctattggagattccaaaagtgctcagctgagcacatcagcacatgctttgttcacttaacaaacacccaggaatgcctaggacatagaagggagttggcatcaatataagccaccatgtattgtatgtaatatgtcatcaactgagcacacaaaatgctaaaacaaaattggttgccagttcagttttaaggcatcacaggagatctgattattgtatttattccttttcaccttcctctggttctagaatctatcttcctgtcacacactcctgacattttccaattcccacttgcttgagggtcaaatagcctaatctccccctttctctctcactagcgattgagtcatgatttctatgcaaataatcaatatgctgtgtagccacaagttcactgccctctctactttagaaaacagccagtaatgtatccaattcatacatatattcaaaaagccaattttccattattacaacaccatttttttttttttgagacagagtctcactctgtcttcccaggctggagtgcagtggtgtgatctcagctcactgcaacctccgcctcccaggttcaagtgattctcatgtctcagcctcccaagtagctgagattacaggcacacaccaccacacccagctaatttttgtattttttggtagatacggcgtttcactatgttggccaggctggtctcaaattcctaacctcaagtgatccacccaccttggcctcccaaagtgctgggatcacaggcgtgagcccctgcacccagccttatgacaccattttctatagaagcaaaactcttctcattaacattgccactgcacttggcctaattcaatgtctggaaagttagtattattctttctactgatagagattaagttacattattttaaaataattcttcagcattctgatcattctttatttgggaaataaaacaaataaatgatcaaaccattctccattctaggttccaaagaccttggctgactgttgtccaatccacacagcactctcataactatttgttattccaaagaattcagacagattttctcttcctaatggcagcaataatcatactcctttcctatctatctgtaagtatctatcatactcctttcctatctatctgtaattttgcactgcaaaatctggaaagtttcaaaagtatcatctattattttacctttgttaaaatcatattaaaaggtactattatgcccattttacaggtaacaaaatttatctcaattaagtttaatgacttgctccagttaaaatagctactaagtgaagagcctgggatacatctgggtctctttaagtctcagtccacagccttcctccataatcttcttgccacattttcttgtccccagctggtgttcagaacatgctgtctccaaaacacacgttcctgaacacaaaactttcttcttttttccccatgaactcactgccttcaggaactctttctaaattaagaggaaaaagatatctaaagcaaagaactcagggagaaattgtaggggtatttttgtatgcgtgctttctttaaaatgcagcttccttggagatattaacgatttcgccaatgttatccaggcttggcatatttgtagagtcccaacacagtttctcctcaccaagggatggaatatcagacagtatgtcactaacagagagggtgttagggatagaggacagacctcagaatctcctgtctctaatcactaggcacctttccaactgggctataaaagccgtagcactctcagttgtctgatgcattctgacacagtaaagaacggccataagcaggaccctgccgcaccgtccttggactggcctggaggcagccacgctcttccttctacagcaatttctcatgtctacccattcatgagaaactttcatggctatattacagtcaggagtcagaggctcctatcacttgttcaagggaatctcaagcctcttcctaaactcatctcctgtacaaccttctgagcccctcaatgcacacacgtgtgctcccaataccacctccatcacagctaaaatgtatcaaattctttcttcatttatgttgaaaaactctatttcaaaaaggattttaagcatcccaggccagggagatgctctcagttccaccttctttcctcagccacttaataactttctcgccaccacaacctggccctctctataatagtgactaaactaaaattgtcattgatgtggcactttaaaaaaaatagtgaaaattttaatttccattcttcatcatgaacgtccacaaacaggagaaaaaacaacatggccagataatttaaatcaaatatcctaagacagaagcagatgatcctggaagaatgcaacttacagagggatggttttcctcagggttcaccagctccagaaccacctttgccttcactcctactcctatttctctccaagctgccttcctcccatttttctgcaagtgaatcctattttgaaaactagccccatcgtctttgcctctgaagatctgtttcctacttggactggaggatggagtgtctccttaatctgtgtttctggagttttgtcaatgtctccattctgccatatctcacatggcattgtaatcagttggttgttttttttttttacccacttctcacagtaggctaggagatcctcaggaagataaactatgccttcattataattgtctttagtacctgctaaatctggcatgtagcagtctctggtaggatttgttttctgcatcttacagtaccatggggtcatctgagtatctgctgatacctttgtgttagcactttagtgtcttagctaggactctatgtcttgtgtttatctttaccatcaaactaagcttcttgggggcggaaggatggcatttctttctggaactctcacagcacctaccaccatgctttgctcatggttggtgttcaaagataaataattatcaccagtaattatcattcccctgtagaggtatgtaacttccaataactaaagtcccagatagatatttgtgatattgttcccaagcagaattaggtctttagtccaagaataggatgccaagcctttgcaggtattcatgccacatgactgcctctaattttgcaggaattcatgccacttgactgcccttttagtcatagtccctgcccataagacctcctttggttgagcggagatgagaaactgcaagtataaaaggcatcctttttcttcatgagagcacaaccacgtaaaaataagcacaaaacattaatatgaaggatgatggcatcaaaaattaggaatgtgtggaagccatgtaaagtgcaataactattagtatcgggttcaaatccacatggtcaaattccaaccactatctgagatcaacagtcttgtcatttcttggttcttaggtaactatgagctcaagttatagcaaagcatggagcaaaatgaaagttaaaattcacttatgctatagttaattttactactaactggtaaccaccaaagtgaatggtaagtttgacaaaacatatattaaccccttccctgctggtaaatattagaatcctctaacattcccccattcctaaaaaagtaggggacaatttccttgataaagagaaagccttgaagagaaaatgaatggtaatttatatcagattgtgactttgtgataaataattcagaaatacttttaagaatatttgttaaaactttgtctatgcaccaaacagaaagccaaatcatgagtaaactcctattcacaatcgctacaaagacaataaaatacctaggaatccaacttacaagggatgtgaaggacctcttcaagagaaccacaaatcactgctcaaggaaacaaaagagaacacaaacaaatggaataatattccatgctcatggataggaagaatcaatatcgtgaaaatggccatactgccctaagtaatttgtagattcaacgctatccctatcaagctaccaatgactttcttcacagaattggagaaaactactttaaagttcatatggaaccaaaaaagagcctacattgccaagacaatcctaagcaaaaagaacaaagctggaggcatcatgccacctgacttgaaactatactacaaggctacagtaaccaaaacagcatggtactactaccaaaacagatatatagaccaatggaacagaacagaggcttcagaaataacaccacaaatctacaaccatctgatctttgacaaacctgacaaaaacaagaaatggggaaaagattccctatttaataaatggtgctgggaaaactggctagccatatgcagaaagctgaaactgtgtcccttccttacactgtatacaaaaattaattcaagatggattaaacacttaaatgttagaccttaaaactataaaaaccctagaagaaaacctaggcaataccattcaggacattggcatgggcaaggacttcatgactaaaacaccaaaagcaatggcaacaaaagccaaaatagacaaacaggatcgaattaaactaaacagcttcttcacagcaaaagaaactaccatcagagtgaacaggcaacctacacaacaggagaaaatttttgcaatctacccatctgacaaaaggctaatatccagaatctacaaagaactcaaacaaatttacaagaaaaaaaacaaacaatcccatcaaaaagtaggcaaaggatatgaacagatacttctcaaaagaaaacatctatgcagccaacagacacatgaaaaaatgctcatcatcactggtcatcagggaaatgcaaatcaaaaccacaatgagataccatctcatgccagttagaatggcaatcattgaaaagtcaggaaacaacagatgttggagaggatgtggagaaataggatgacttttacactgttggtgggagggtaaattagttcaaccattgtggaaggccgtgtggcgattcctcgaggatctagaactagaattaccatttgacccagcaatcccattactgggtatatacccaaaggattataaatcatgctactataaagacacatgcacacgtatgtttattgaggcactattcacaatagcaaagacttggaaccaacccaaatgtccatcaatgatagactggattaaggaaatgtggcacatatacaccatagaatattatgcaaccataaaaaaggatgagttcatgtcctttgcagggacatggttgaagctggaaaccatcattcttagcaaactatcacaaggacagaaaaccaaacaccgcgtgttctcattcataggtgagaattgaacaatgagatcacttagacacagggtagggaacatcacacactggggcctgttagggggtggggggctggaggagggatagcattaggagaaatacctaatgtaaatgatgagttgatgggtgcagcacaccaacatggcacatgtatacctatgtatcaaacctgcatattgtgcacatgtaccctagaacttagagtataataaaaaaaaattgtctattcacaactatacacctgcactgcccaagacactaaccattagtcatacaaaacatggctattgaatgcctgaaatgtgctagtccaaatggagatgtgtgggaagtataaaatacacttcaaaatgcgtagacttagtaaaaccatgtaaaatatatcattaatagtttttatatgaattttatgatatactttagatataagggcttaaataaaatatattattaaaattaattttaactgtttatttttacttttttgatgtagttaccataaaattttaaactgtatatgtgacctgcattttatttctattcggcaatactactagagatgacattgcagcagaaaccccgtaaaacatggcttatgctacgattcacactgctttcctcaaaatctagtgcaggtaagacagtctgggatcagctttaaggatatatagtgaaattcaccacagcagaaaccgtaaaacttgtagccaaatttaaatggaactaaggggaggaagaaacaatgaaaatacaaaagaacggaaaattccaaaaccgtaactttttgatcctagaaaatagcgtatgcagtcctctactggagacacatactgagacactacctcctcccacctcaaatccttcctatccagctccctgatgaagacccatcaggtcactcctcccattaactatcctcccattaactatcctcaggagacactaaaaagtactgagcttggtaatgagagacagacactccttctgctactatggatggatagttactgaaggtcactaatatctgatgcaaatttccaggtgttctttacggaaaggatggtagtctttggtcctttcaaatggacaagtataatttatttcatatgtttctatcagaagcacaagaggcaaaacccagagggggataatacttacgaaatagaaagcaattacatttctttttcctccaacttccaagacagggaggaaaattcattgatgagtatttattagctaatgatgaaagggcacttcaaaaatgaaaatggctctaaaatgcactgcattatcctgattgcagaaaatggagactaaagagaaagggcgctctataaaatgtcctcggcaattggctctgtctctcatgagccactcagatttctttgtccctcccaccataataacttgtcttcatggtcatagccaagaacgcattctttgtttggttacataagcttctaaaaatagtaatttatcatggaaatgctaaatgatccttgaatatagtgttttaatggactattaagttattccagtgtctattttctttaacatattataattaaagataaaatcttttttggtgcttttcaaactagaagcatatcagtctcatgctttggatattttttcatcttgaaaaacatgaagaaaggtttcctgtggtcaaagaagtttcaccacaggcagagagatgaattttctcctcattactgaggtccaataaaaaaaaaaaagaggaggctaattcaaagtgtaatttattttttctgtctgtctagctagatttgataaatgaattcaaagtaaaataatctgagaaattagctggccaaatatttaaaggaaacctaataatgcatttctcatttcttcttagaagtttataactgaaagaatcccaagaaatgatctacttaatgtccctctgaaaccagaagggtaaggtacccaccaaagttacacagcagggctgcttccctgtcctctgtctggatcacacgttatcactcgccttagcacccggtgagtgaacaagtggataaatgaatgaaaggaagaaaaagaaatgacttaaacagaacttgagtagtcttggaggtatataataccaaggtgttaagatgggcctacagaaggtaggaaaaaaacataaagaagtataggagactttcttcatcaaactcacaaatgaccaagacgatataaagagccaggaaggcttcctatacagtcaacttcttcagtgtttttttttataaatttatttttattttattttgtattttttgagactgtcactctgtcactcaggctggagtgcagtggcgcgatcatagctccctgcagccttgaccttccaagctcaagcagtcctcccactcaggctcctaagcaactaggactacagttgtgcacctccatgactggctaatttatttattcatttttttgtagagacggggtctccctgtgttgcccaggctggtctcaagatgctgggttcaagcaaccctctcaccttggccttccaaagtgctgagattacaagcaggaggcactacacctggcctggtgatttgttttgttttgacagtatttttttttaattgaggtgaaatgcccatcacataaaattagctattttgaaggaaataagttggtaggatttagtaaatttacaatattgtgcaaccaccacctctaactagttccaaaacatttttatcatccccgaagaaaaccccatacccattaagctccctattttcctcttccataacccctggaaaccactaatctgctttgtttctatagattcacctattctggagatttcataaaggtggaatcacacagtatgtactgttttgtgtctgggtcctttcacttagtctgatgttttcaaggttcattcatgctgtagcatgtatcagtactttattccttttcatggctgaataatattccattgtatgtatatatcaccatttagtcaactctttcttatccatatgtaacttatgtgtggtaactttcgattttcagtactcactgaactccctgccatcaattaacatactcttaagggtcttcactcagacgccagtcattgttcaaaaaaatggaaagctgttttaatattgcatcaagtcaacataatgactctctttgtaaaatctgttatattctacaaagcatttctaacaacaacccaaggaaattagtactattattattatctttcttttgaagatgagaagactgcagtagtgagctgaagtagccattcagtgtcacagctggtaaatggcaagaccaggactggatcccttccctttccattcgctgcccaggatctgagctcgaaacatgttccattttcagagtgaagagatctgaaaatctgagggactcactgcacattgcccagccccactcactctactttgctccagtaattgaggaaattccaggagcagtgagatggagtcctgcagatgaggagcttgaattaaataagttcccagacaaacctccaaagagggacaggagtggatatgaggattaagcaaactctcagagcaaagctgcagaatatttcagaagtaaggagagagatagaatggagcagggataaggtttgtttgatgtttagtggtgggttcattggtccaagtcatagcttgacataaattccagtgttaaatagagacaatctggaaggttgatcattatgacagcatagataattgagatgacaataattgtacatgcatttcaaaaactcaaatgatacagcataagttctccccataggcacagtgctttagagtttatacaacactttcacatccattatctcctgaggtcctcataacaataccattaggataggtatttttttttattatactttaagttttagggtacatgtgcacaatgtgcaggttagttacatatgtatacatgtgacatgctggtgcgctgcacccactaactcgtcatctagcattaggtatatctcccaatgctatccctcccccctccccccaccaggataggtattgttatacccattttcttgatgcaaaaattgataaggacagttaaatcctgtagccacacagctaataagtcatgaatccgggactcaaatgaaagtttctgaagcctgtacgttttgaattctgtctgcaacaccatgccacctcaggccaacttcaagggaaaaataattatcctaaatcagtttgcaaaaaggaaaagagctgagaaataaaaattcctccaggcaggagaaatagcaaaacacagcatctcacactgttgatggggaagagaacatgacttcgtcttgagcgtttctaattttgcagctcacacacatcccatctcaaaattgtaaatcatgagacaaagtttacctctgagacagtaggaatgtagcctgccacctgtaaaggaggagtttaaggttttgccaaagttcagattttttcaaatcaaaatagcttcagttaatccagggatatgcacagttacattttattcctaaacactgggcattttattttgtctgtaaggttaccccttcttctttcattacaagcacttaggaaagaagcctttctacaacaccatcatgttatttttctaaaaatagaatgaggctgggtgtggtggctcacacctgtaatcccagcactgtgggaggccgaggtgggcagatcacttgaggtcaggagtttgagaccagcctgggcaacatggcaagagccccatctctactaaaaattcaaaaatgtagctgggcgtggtggtgcacacctgtaatcccagctactctggaggctgaggcatgagaatcgtttgaacccaggaggcagaggttgtggtgagccaagatcatgccactgaactcccgcctgggtgacatacataaataaaataaaataaaataaaataaaataaagaatgactcaaatctggggcctctttattgggctgtagggctctgaggcagcagcttggccatcagtcaagaagaaatggtctgttcttccccagttagaggggtccagatagaagacgacccagttgtggaaggcccaccagctcaccatcgctatcattttgtccttttactaacatcttggaagctccttacacatgctgtagaaatgagagaggatcttacagtatctgggatttataggcataaattccattagccagcctcacaactaattgctgttctaacactcagcgcgggataaattataattgatggtaatacatgaggagcaatgatttattatagtctctctaaaaaatagaataatatctgtgagtttgctggggtggagtggagggccagtgtgtgggaaggagggagaaaatggtcactagtgactgttttgcccttctttctaaaagcttatcagacctcaggtggactgaccttggacataaatcagatgagtggaaacataggtgtctgtgtgtttggttgagctctgattcatttcattattgtctaagtagttaggcaaagtttgacctatcgcatcccctactctctagcttctgctgctcagcactgggtgaccttggtgaaacattactgcccttgcactaccgtggtgtctggtaatgcaacctgaatctggaatcaggtgccctagacttgaatcttgcatttgtcatttattagtcatgtgaccttacctaggcagcaagcaggctaatgagcctgcatttcttcaactgtgtacagaaaataatacacctacttcttggcactgttaaggaaatgaaataaaataatgcatattttaaaaacttgaaagctttaaaatgtcattcagatatgatttatctacccactaaacaaatgcaagtcactattcaggtgaaaataataatctacatccttcctcgtgtgagtttattgccagattttcttagtcattttcacaggataaaattaagtggacatttaagtacaaccagaccatgaaagggctaacttgatatgttctaggcatagagggtagggaggtttatgttaaggtggttcgatttaatatctcacatgtcactcattgtaaaggcagtcgcagggactgacccacgaatgtcctgttgttgaaaatcccataatgaagaagagaatatgacttcaccagtctccttcctgcccctagaagggtttccatcatttcattaaaagagaaaaaacccaccacgtactgctcaatatggtgactggctcctgaacagtcaagatgttattttcaaacacattctttccttgcttttccatccccatggggccctgctctaattcctggccttctgaaaccccgtggctgcagcttccatcttactgagcagattttcaaacaaagtccccttgctgtgtgcacagaactgccctccagagctgcaggcacgccggtcggggggctcaatgctgaatttatttcctacatcttggacacgtcgtcgctctctctcctccctccctccctccctccagtcccctctccccgcctccccttcatcctaaatcctgcagccatgacagaaataaattagctagaggtacaggtcacaccttggagagcagtaaacgttccgtgggaaatcaatagagaagatgggattctcaaacagctgaagcagaaggaatgatgcattgatggctatacataaaccaaacaaaggagtctcagcacagccttcccggaagggactcgcgcactgggcttcatttattctaacacctgaacctgagacagcaccgcagaaaaagacgctccgcagatacctgggcttttttcctcaggaaggctcaatgttgctgggcgagtgttggtgaaaatgaaaaattatgttcagatcgtggatgttaaagccagagcccccaggaaacccctggagaaccgtaagctgagtgtgtgagacacacatctgttccaggaagacctcctcatccacggctgctgacagcaaaagccagagagggattggctggatagttacctgaagaggtgtaattcctaaagtcatttagtgtgatgtgtcggaaacgcctaggctttaggctctggcagacctgggttccagtcctggcttcaccactaggtagcaaaaatgggaaagctgcatttataaagtggcaataggaggtctaccttagaggcaattgtgcggattaaatgaataacacacataaacacctagtacaaaataggcactcaataaatgctagttgctttcccttccatccccctgcctgatagtaagcggcttcgtcatgtctctggagttctacaacttctccccacagagttttcacaatggcaggccctcataaaatttttctctgatggcaaaagcaatgtctagcaaaaacaggtgctcagcaggactttcggtgccctacagtctcgatcagctgccaaatgccaccccaaataagccacctaagttaaagcagtgtgcctgctatgcaaatgcagggatggaatacaatcctgcccctgagcacctcctatctagaaatcctgaaatttccattgctatataccaagagccgatttttctcctgtcttcccttgctcttttttttctcctgaaaactgcatttttaatatcttttcctcctcagtttgagcctgatttcttcctcacacacagctgaatttcagtaataaaacaaatagttacagtgagaagccattataaattatctagaaaataaacatttaaataatctccatcctaaaatgtttaattgtggcaaaatgtagagagcatgaagttgaccagcttcaccatttttacgtgtatgctcagtgacattaagtacattcatattgttgtgttaacatcaccgttatccatctccagaacgttttcaccttcctcatgtacagcgctgtacgtgctaatcataactccccattcaccccttttcacagcccctggaacccgccattctactttctgttgctataattttactactctaggaacctcctgtaagtggaatcatatgatatttgtccttttagtcctgtcttatttcacttaccgtaatgacctcaagtttcttccatgtcgtagcatgtgtcaggattccttcctttttaacaccgaataattttccattgtatggatataccacattttgtttatccatacctcctttgatgggcacttgggttgtctccaccttgtggctattgtgaacaatgctgttatgaatatgggtgtgcaactatcccttcaagaccctgctttcagttccctggggatatacccaggagtggaagtgctcggtcaaatggtaattttatttgttaatttttgaggagccatcatactgttctctatagcagctgcaccattttacattcccaccaacagtgcacgaaggttccaacttctccacatccttgtcagcacttgttattttctgttttttttgaaagtaaccattctgacatcttttcacggttcgtatcttctctgggaaaatgggggctgtatatgtgtggcaaccatttgtttggtagcctgacttgttcattcctccttgcatacaggaaattcttaacgtcaaccagattctgctctggctatagcttctgtctaatgtctctgtcttttccaagtcttctatctttcattaattcaggaaatgtaaagttaagttgaacaattcaagagttttcagtactctgatataaagcagtttgcctagcccagttactcatgctaccctcaatctcagtaaatgaaggagaaagccttttggttttgttttgtcatctaggctggagtgcagtggtacaatctcagctcactgcaatctctgcctcccgcttctcctgcctcagccaccggagtagctgggactacaggcgggcaccaccacacctggctaatttttgtatttttagtagagatggggttttgccatgttggccaggctcgtctcaaactcctgacctcaggtgatctgcttgcctctgcctcccaaggttctgggattacaggcgtgagccactgcacccggacaggaaagccttttcagaacagaaaaggtaaaagcactagaacctactagaaaacactgagatagcttggagaataaaagtaacagctctcatatagcaggctaaattttaaaacatcgtttaattttttttacttcattaattttattttattgtatgtgagaacacttaacatgaggtctaccctcttaacaaatttttcatgtacaatacagtattgttgactataggtacaatgttgaatagcagatctgagcatctcacctgagaaaattcccattgacaatttcagatgtgggaactgaggcacagtgaagtgaaatcatttatccaaagtcagacagcaagtaaattccagggtcaggacccaaaacccagtcatatcactccaaatcccttttttttttcaccatacaatacgacctaaagattactaagctctttacttttgaaactgccaaacttttaaggacctatttgtaaaagacaaacaaaaaagaaatgtggtttgagcttgctgttgaagaggaatggttccctaaaggcaggcagtacatagacttcaccaagcactaacttcatgggacgtgacttgctcaactctggacaatacatgttaatggacccagaatgaggcaagacataggcatcacccatgaaaggaatgtagtctattggacaacagcagtcctttccacttagaatgtttcttgaaggccttgtgtgacacatgacatcctatgctcagctggtgaatcatgtgactcctctttgcccggggggaaacctatctcctatggggataggtttcctcctctttaaactttccaggggtattgtgaactttaaatataatattgataaagcatgaaacctagcatcaggtgtgtaatagatgctcaataaaccaaaacccattgccatctcgctgctgtatccccagagtagcttttcattcccagcagggacaagtgggtaaagaccatgaagaggcatctgaaagagaactctgaactgagtggtaaagaatttaagaattttaggccaagcaaggtgactcacacctgtaatcccagcacttttagaggccgaggcaggcagatcacctgaggtcaggagtttgagaccagcctggccaacatggcgaaaccccgtctctaccaaaattacaaaaatcagccaggtatggtggcgcatgcctgtggtcccagctccttgggaggctgaggcaggagaatcgctcaaacccaggaggcagaggtcgcagtgagccgagatcacactactgcattccagcctgggtgacagagcaagacatcttctcaaaaaaaaaaaaaaaaaaaaaaaaaaaaaaaaaaaaaaaaaaaaattaagaatagacacttagaatatttaaccatcaactgctgtccctgaagtttgcctcacatttctgcaccaacagacttgttttactggtctgcatttgagtgctctgtgcacttctgtgtaccatttattcatttagactgcacatgctctgagggagtggcccctccttccatttggtcttacagccctgtgactgtgcacttacagttcccggttctctacagagaacagtccattacggatcactgatttgctcagaagcaggcccttgagattcatctctctaaagggatttctctaacgtaatgatatgtgtaagccaggaacttcggagcccagacagtgcacctcaagagcctggtcagcactggtcagaagaccccccataaaacccgaaatcttgacatttccaaaacctgtctgcatatgtgcctttacttctttttttcttttttcttttttttttttttttgagacgcagtctcgctctgtcgcccaggctggagtgcagtggcgtgatctcggctcactgcaagctccgcctcccaggttcacgccattctgctgcctcagcctcctgagtagctgggactacaggtgcccgccaccatgcccaggtaattttttgtatttttagtagagacggggtttcaccgtgttagccaggatggtctcgatctcctgacctcgtgatccgcccacctcagcctcccaaagtgctgggattacaggcgtgagccacggcgcccggcctttacttcttttttgactcccactgaacctttgagactgtaattgactcccttcccttcagagagactcctcacttccgagcagcctgcttagccgcattggaaagttatggaagataactagatttgactcaacaaatgtgcacttatctcagacatatctgcctggatagcctccctctggtctctccgtggactaagagcaagaagaataagcgttctgcctcagttaactctctgtgccatctagcacatttttgtattttcaataaatatgccttaagcactattcctcttgtggtgttaatttaccaacacaagtgccctgaggatctgtgggttgagctaagagctgactgggattcacagtaagaatagttcatgcttaccttgggtgatacaacacaagcaacaaataagagcatatgccaatcaaaacattttcgggtttagtctgctgtgtgaggcaccgtgctaagtactttacatgaatcctttcatataatcctcatagcaaccccttggtatccccattctacacatgatgaaaaagagatgcagagaaattagcaaagcccatgtgtatagtcaccataccatagaacacacactttgggattctacggataggatttaaattcaagtctccaactccttgagtgtgactaacataccatctccagctggagttttctccttcgtagtgtgacaatatccaaagtccctggtgctgccacactttccaccttcatgaatcatggaactcctcttttatatcctatctacctcagtaacccagggattcaggatggtctagaatttcaaatccccagttgggcaacctgaattcccatgtagcctctatcctgaccttaggcagcaagtcattcaatctttcggtttcctcatttgtcaaaagaaaatgacaacactggcccaatttattttaacaggtagtgttgaagataagatcaaaggaaatatgtcaaagtcttctgaaaagcttcaaatacttctcaaattattacagtaatggattcagttggagaacttactgcacagaatgtctttgtccaaaatcttaaaatgaatggggaaactgagttcaaggtgcagaagtggaacccagattatttctattcttgtataagcagaggcttggactggagctccaggtatctgtatgcttgctccagcctaggcgctgcttggggcaaatcactgcacttcactacaaaatatggatgtgatacctaccttctcccgaatcctatgggtagggtctgagcaggagacaaaaacactcagaaaacttgagacgagaaaaactctagaaagtcaattatatgcattttttaatatggtgtcagattttttttctcccactcattttcccttgtctcaatctaaattttatccagatgtgaacatgaagaggcctgtctttgttcattctctgcttctttggttttcctttgtgcctcaaaaggttttggtgctatgcttcaagacacaggtcatgaaggggaaacagttggggtgctgtggggagactgcagtattaggaacgaggactgagggtaaagagttacagcatgctccagaatgtgcacctcctctttgccaacgcagagacaaggtgatgaaaagatccctggctccagacaaatgccctcagccttgcaaagccttccaagaggcagcgtcccagagtccagactgcaagtgacttgcatgcgcacacacacacacacacacacacacacgctcacacacactcttccatggaaaactgtgctctcgcatcccagaaaaggtttgttgtttcaattaaacctcatcaatgccacatgtcagagaagaaagaaaaaaacaaaacaagactcaattacttcagctatctccttagggattgatctgtatcgaataaaccaccatctacacatggggagaagcttttacttatgaaaaacagaggcaggtgcagaagagcagcatttggtactaaatcaaagctctgggagcagaaggaagtggatttagacgcatccacttagctcctcctgatatctaacttgcagggtggggaacagatcacagccttggctgggtctggcctctgcttcctggtccccgctgaggtcccgtcccactttgctcactgcttcagctgcccggtaagaacagatggacagaagttaaaagagcaaggtcagctcattggctaagtctcatttcacaccctgccccacctctatcatccctttctgggacataaagatgaagaaagcagggcaggggtgttgctgcatttgattctggctgaaactatggtcgtttcatttacatcccctgaatagctggcgagtctgatttacacattgataatatgtgatgctttgtattccagcaaatatttaatccctgacggatcaataatcctcgcctggctgttcttttttgaaaagaaataaatccccttttactcttaaaattcttgaataaaattaaagtgctttagcctaggatgcactgctcctacacgaagccatgtggtttcataacctcagtcctcagatgtttttaaaggggccacctttgctaacttgatattttctgagatcctaacatctctccaatgagtcctctgtgttatcagttgatattataagacagccctttaaggcctggtatacttttttaaaattaaaaagtaaaattattaacctaaactgaatcagtatgtacatagcatgcagtatttttttgcattttttgcttatattcaccatggcagtcttgatttaaattctttattacaaacctttctataaaccatttccctccaaaactacatttttaagaaaactctattcctacacagattcttaaaaagctatactcccgtcttagagttaaatttgaatattttgaaaaatgcacattaaacgtggaaagagatggctctcctctctataaggggctcccaaggcagcctcaaagctcaccaaaagttccaaaacaacatccacaacaaaacaaactctctttcatctctggcagcaacaaaagcaataactttcaccaaacctacccaagccaagaattaatataacacagaacaacacatccacattcagaccattacggctacatcagctcaccacaatatttgtttaaaaaacacataatttgtggtagagagaaagaacctttcatacaaaaagaagttctttcaaatgcaaattaaccaaaagacatattttccctgtgtttgggaaatcactccaatacatgaaaaacatagtttttgtgtggaaaaaaaaaatcagtgtacacccactaattgaaaaggcaattacattagctgtagattaccttaacagttaagaaaagttaactcctggctccataagtctttaagaactttattagcatttactgacctaagtagtcttcagttcccaggtagcaaagtttcttttcttctccactgaaatgctcatatggacactgaaggacattgtattactgaactgatcggaaaagaatactgtttccattcttctggaggaaaaaaaaaatggaaagaaagaaaagaaagatggaaggaaggaaggaaagaaagaagaaaaaaagaaagaaggaaagagaaagaggaaagaaagaaaagaaaggaaagaaagaaagagagagagagagagaaagaaaaagaaagaaagaaagaaagaaagaaagaaagaaagaaagaaagaaagaaagaaagaaagaaagaaagaaagagagagaaagggagaaggaaaagcaaggcaaaatgcagtctaatcgagtattcttcctggtggggaaaaaaaagtaaatccactatcctggaacgagttcaaacatagcttgacaggctccaggagaatttacactgagcatgcttagccccgcactgcttgcatgagacactcttaatgaatattacttccttcccactggctattcctgctggaagtccacacccacccctctttcagaagtcaggaatttagcttcagccaaagtccagaaaacatgcttatgcggagacaaggcctcaccgatccataaactttcaggttgtgacctgccggtcagtttgacaaatagaacataggggtgaattttttttctgcccttggttatgttgccagctttatgcctgtcctaaactgcagttcctctggagaaaagaaaaacagacagctttctttctgaagaacatgacgtcctcaacaccacagtaaagacctttcctgatcaagcttccaaactgaaatcagaataagggtcatctgcatattaaaacacaacactcgatgatttttagcttctggataaaacaaaagtcctaccccaaatgtatgctttttgataacttacataacacctctctcaaaaatgctgcatgccaaagcactctctgaaaatatgttcaaaatccagctttaacctgctatgttgtctaaacattggacttgtatacatttaggtcacactaaaaactgactttctttttcaaacaatgctttctctttccctaaatccctctgtcatgtttaatgacaggagacctgaaattctgaaaatttaaaaatagattacttttctgacagtctgagaaggcaagattcttgctctgccaaaaaatcaggggagtggggaaaggggaggataagcaggtgagggcctgatatagaccgcatagtaaaagaagggcattttagattttaaaattaataataaggtacttttttgttgtccatttgatatttctagggtgccatttatatgtatcaaattacaagttataaatattattaaatactcatttgaactgtaatgcttatttgcctagacacacacacatacatgcacacacaaaaacacacaccccaatttgtggtttgaaaaaaatgatgtcacaaagcatcaaaaggcaatagaaattttctaagtctccaagaaatatggcgtgcccagtgtctaatacaaagcctgcctggccagcattgattctttggattaataaaggatgcatctatgaacctgatacgtaaatccgttgcctctccatgcctgtaacactttacgcagcccactgctgagctgccatgatatgttctccctatggaagatctttgtagcataaaatacgtctttgcccactattcaataaataaaat

SEQ ID NO: 369 - DNA, 13067 bp, Homo sapiens
  source 1..13067: mol_type = genomic DNA
ttgttggatatttcaagcagatgtcaggtgggtgttggcggcctgtgagtcctcctgcagtagcagcagcagccaagtacggtttgataaatgctcaaggtgaaatgtggccttactcaaaaccccagggtgatttagggtagaagagcgaatattcagaggcgggaagtggtgagttatattgttacattccctttcgatggaactaaatgcggttatctgcggtcctaacctctctcgcatcggagtgcaatgtttctgaacaagctctgttagaactggaaaatgggagggggtgagggagcccactgacgacttaacggaatcttactgaagaaaatacaaagataaccgagatattcatgatattacatctcatgatcttccagacaagcgtctctccggaacaagaaaatattcccaaatttctccctagcagtggccttgggtggagtgagggaggaggtgggtggtgagtgtagagaagagaaggtctctctctgttgtcaccctcagcccccttcattgaggaggaacaatggccaggcctggagttcttcctgaaagagaaactgcaggaaggcagagttgctctttgtaccccagcccctttagaggagggggagtcatacacaggatccccctgaccactgggcggtgtccgggagatcagaacccctcagatactctgggagctaaaaaggcgccgccctgtcctcccagaagtcccacgcagtcgctggaagaaacccaagcaaaacccagcgacctcaaaattcgccagggggataagcggggagaggaaaaccactcactctcacatgccctgtcagtccccccacgccaccatcccaatgtctgatcaggcttgattctgctgacgtgtgtatttcagattaaggatgtatttatttatttatttatttatttaatccttcagatcttcccaccccataaaagagacttaattcctttccagggcgacgggttgataaaaggctccattttaaagcaatgggggaatcatatgactgtgaccttgacatgtgaaaggggggaggggcaggtagtttggggcccagaccttaggcctctgcaattctggggcgttctaggcccttgataagaacatcaacaagagggatttattttcaaaggttaccattagcagttcattcactaaagttgagaattcggtatttttatattacgtgaaatacatgatttaattatactccaaaaacaaattaaggacaggccttctacacaaattggaggcagctaaatgctcttttgtgcctgcagccctcgggttgttaaagaggctgctgatgcatgagaagtaagtgactgatttaactcattgggatgcaggaagcgacctgccctcttttgaaaaaaagcgagagagagagagagagagaaagagagagagagacttcgagcttgagagagggaggggagaggagaggagggagaaggaaatgacagagagagagagagaaaggagagagagaacgcagagggagggaggcagggagggagaccaaacccccgctttactgcgttgaaagcttctgaatttcaagcagaaagtagaaggagctccaaaggcagtgagcgtctttccttgggctgcgtgtgccgagcgtagacaatgaaaatcttcatccccctcccccattctactaggctacaagattcttgttttcgttccttctcaccggtggaagatgtgtaaaatcaaagatgtagaggtgtgtagtgatttttttaaaagccaactaaccaccgcacggactgcgacgcggattacccgagcgcacgccggctgtaagtaccatcctttcctgcggtagccgggctctgcgtccccggctgggctgggagtgttcgctttgtgaatcgggttgttgcttgtgttttggtgttttggttcacaggggcttcttcgaagcttacacttttcgcacgtgagcgggagaagcgtttcgccggttgtgggcgtgcagaacacgatcctggttgactttgatgcggtgacttggggtggcgggcggggggcggcgggaggcgcggagtcgaggagttcccgcgtcgcgagcatgcttgagagccgccggctcagctccgggctgtaaggttggttcctggcaatggatggaaatcaggtcacagagatccctaagcttgccaggctctcagacacgcttgggagacagaatggaattggaaggagggatctgaagaggagggaggggatccgtgttcccccaccccgggcctagaatggagccccggccagccgcgggccgggccccttggttttcaggacttattcttgccggggttggctcgcacgccagcatcgcgccttcggtgcgtcttttatctccatctcaaatatgggatcttcttgggacgaggactgaatgagggtgggagagagggtgtgtctcacggcgcccaggagggagaaattgtggttctgagaaggtattttttggcctcttgaaaatgtgcaagaattccgcgggcccaggctttctttgtgtggcgggcagcgccaagcgctttgtgcttcacaaggagaaaatggcgagtcctattgtgtttaggccattttcttccggtactaggattttcccaagttcgaaatacttcttgagaaagtagccttctcgtgcccaagaaagtgtgaatcgctgaggctcggccccatggcctggcgtgggtgctgacctcagtttaaaaccaagggcctgttttcttaccgttggggtacttgtatcaaagcacagatatgaccggtttgtgcggatcggtgtcctccaaagatcaacagcggctcttggggtttggaaaaataagtgtctatttatatatgcatatatacatatatataaaaaacatatttttcctgacaatgtgaaggagaaaataaaaaacgaaggacaattacgtttttgaaagagggaatatttctttccctttctcctttctcacgctcgaggaaaccccaggagatgttaaatgttactctgccgggtcagtctcttattttttaaactgaagatgaaatgctattttggctagaagaattattccgcatcttagccactggaacatatgctttgctacaaaaaaagtgtaaggtgttagagatggatttagtttaatgctcttagcgtgtgtgtgtgtgtgtgtgtgtgtgctatctatatgcctctatatagtgatgtaaatatggagagagagatgattgaaaaggttgtttagcttttgcccctgaatttgtcatttttgtaatttttctgcacttgttaaaccatatgtaaaagtggacaaggattcctgtacaacaatgtctatgtctcttttgaaaaccgccaaaaaagtattgcaggttgaaagatattatttcctgtttactacaattatttggatctttaaatggagtggtggttttgtgagctcaaaaataatgaaatgcaaactatctgcttcctgtacattcaatttggtggcaaatatagaaaaatgagaacaactgggatgaggaagagaacctaaagcctatagcatttcccccttttgctatcattttaaatgctagggagtctaatttgtgcagaagcattgtgactttcatttttcaaaaggtaacactagcatgtcctttcatgtggatcaagaccatggacagcgaactaatattaaatcactgagcaaaaaaggactctaataaaattttgagacctgagtgaaagtttacattcaaagcatgttagaagtcaaaaataatctttatggtctttaaaaggaattagactggtaaaatgtggcatttcaaacttattctaccaagtttcaaagaaacaatgattatgtgttcagtttttaccctgcctcaaatagtatatattacttatccaattaaaataagataaagcccaccttttggtactggtaaatataaaatttaaaactatcagttttagatgtagaacgttttttataaggccttgaaacagaatggggatggagaaattttactattttagactggcattggctgaatgacactacagaaaattaaattgatttttatcagtgaatgaatttctaaatgcataaaattgggaaaattaaatgccactttgatagacaggaataatatgaatggagatataatccggctattccttctactcccgtgtaggcattgtactctataactgacagtgcaatgttgtgagcaagcatttattttttttccaagaaagtcacagattttttcatatatactgattagatttgggacacaggattggttcagtgtgggtctgtgctggagatcagcttattttgttttatacattgtttgaatagtctttactcctttacagaattaaaattcatttaaaaccatttcatttgtggattacataacttattcaaaattgctcatttaaatttccagtttgatgtgtcttttagcttatttcataacctgactttagtgtgacctgtaaaggcctggaaaatcatataaagcaaaaacaatatgcaggttagaagaattaaaatagttcataattaaaattaagttaaaattacatcatttaaaaggaccttggagtttataaataaattaatttttgatctttattcatcagatttggctataaaatgaaactgcagttctttgaatgtgcaggttgctggaattagatgctacatatattttgaacacacatacttattttaatattttagttttagacaacgtattcaaagtacttgagaagaatatgcaatgacattttttccgtgtcctaatcaggaccatggtgaggtccccgtggttcaccgagtggtggtccagggctctggttgggacgctgagttaggttggcaaagcgtcattgttttgaaaggcacattcgtccggaatggcattcgtgataagattaaacataaacctaaaccttggcctcgggggaaggcaggctgcggggttgagaagaggagatgcagattagctctgcttttgctgcttgcgcacataattaagaggcggtccctcagctggagcgtgggctgtgtccggcctaaggtgcttattttcctgttacttggccaaccgagtgtgagtgaacaggagcccgagagcttaaatgtgggatctagataaggtgtcgactgggttgtgggcgtttgtctccatgttagggagaggcaactgagaacggtgactttggcttgttttgagagagcctgggttttgacagcaggacggcgaagggagcgcttggagaggctggaagctcgacgtcttagggagctgcctgcgggcactgggttgacgccaagaggttgtcggcaagggcagggctcttgccctctgctgtacctaggctctgcaactgggggctgcgagccttctgcggctctttggtttcaaggacacagcgagctgctcaggactttgggagccaacatctgtctgactggtgacgtcagcagcccgtgtaatcctcttgtgctgaaggcagatgccttatttgtttggctggagcgagccattaatccctaattctggatcagcaagcgagggggaaagaccggaccgctccgacccaccccctccctacccccacctcccaccttaaagcaccttataccacggaaggctctcagcctcttctttcctctgcgaacgcgctgagcagcgattgaaaacgttttggtcctctgcaggtttgaacagggctagcaggtctctctccggatttctagggctatgggtatatgtaattctttctctcatcgatcgtttcgattctcttgccggtcttgcagtttgcagggtcctaaacgaagaggggtggagattcgagagtgcgggtctggcgtgtggtccaagggagggggtgaggctgggaaagggggtgcagaatgcgggaacggctgggactgcacagaaggaccatctgcggactcgttttcactgctccagctcccgaaatcgtttctctggacgcggcagtatccgcagcgcatgcaccctcctctggacttccgcagcccagacctgcgcttacagtcatcgcgccaccccctccccccgggctgcgggccccgcgctccgtgggctcagggtcccctccgcgtccccctgaagcctggggacggaggtcgcgaccggccgactggggtcctgtcctcttgtcaccttgtatccctcgcatgctccctcccgcctcgtgtccctctccccaccctccccctcctctctcccgcctccctaacactgcgctttgattctgtttttcaggggcgcattctggggtctctgcgcaagaccagctctcagctctctctcctttcctcggactctggagcgggagcgggcctttccctcgggtcgaccacgccgtaggggacgccgtgaaaagagccgtcgcgcccgctgcctcctgcccgctgcgcagagggctccgcccgtagaggtcaacttccctcacccttttctctctcctgcttgccctccctccgcccggcccaggcgcttccagccccagactgtggccactggctgaggagtgcgagtcggctgcgctgccctgagcctaatccctcttccgggcccagacccgaggtccgcgctcctgggcagtggggaagctttagtgagcaggcttttctctccgcagcaaacttgtagccagaccagatgggccgcccagctctctcgggactaggcaggtgcggatgagttaatttttccgcattacaaagaaagatgacccagcccgcccttggactctcttttcccaaaatctcccaaccaaacccgcggtaacgttatcaaaggacacagagcccaggcatatctgtgtgtttatcttacaggcacacacgcatggttttctcttttatatgctagatttcatccctgacagcagaaaatgattggcaatggttatgacggagaacatgcaatagcgtggtccttaaaaacctgccattccttacaagtgccttagaaaggattcagggcgaaccaactgggttaattgcattcagtaaaataacacgattacaaaattagatctgtaccagaggggtaattaacttggatccacgccgtcatttgaaaactagatttataggcttatgtatgtttttaggcgtgtgctgtaaatggcatggagatatatgcatatgtatacgcaggcacacgcaccgtctacacttccacggaacagactaattaacagcggctctggcagatgtgtcagagatgagcagagacaggagctgggcttatgagttatgactctaggggtagagactcagagcggagagagggggatgggcagggagagaagagtggtaatcgcagtgggtcttatactttccggatcaagattagaggctctgctctccgtgttcacagcggaccttgatttaatgtcatacaattaaggcacgcggtgaatgccaagagcggagcctacggctgcacttgaaggacaccaaagcatctcagggtcagaaaggggaaaaagcaattgcagggaatttagggggtagtaaaaggaacccatctcttgccgcataaatgccccccacccccacccaggactgattctggaagcaacctagtgttcgaaagggaaaggctcctacttttccattacagccgcggaaatccgcaggcaaatctccgaggagaattttagggaagcttcattgacagctgtctggagagcagtagttcccgcctgtgcaaatattccagagagttaaatcatttagaaagcactagttctttcaagaacaggtagtgtgattgtctgcagtcctgggccaagctgggaaaacaaaacagcagagagaggtgtaacattaaatagcgtcctgaccacactgcgcaagaaacagcaaatgaaacgtccaaactttggaaagatctgaagaacacttgccgcccgcatttccccttgacttctccctttttcttcccaatctcgaggcgttcatgcctggctttaagacgccaagataactctcttgttttggcattgtcgcaatgtccaaatcggtcaaaggagtgggataaggtgaaaggaccaggtcagaaactttagaaggactcggtaaattaatttgtttggaagccagtgaggtggactatgttgaggtagcagttccgcaccacgactttggagccaaagaaaaacccaggccgaaaaagcgagccttgatgtctttgttctgccttggcctgcaggggttgggaacaaaggagaggagctaagaggatgcaccaaagtagccgcgccctccctgcctggcgctgtccgcggtgctgaccgtggcccttttctctctccgtaatcaaactggaaaagcaataggaccgtcccgtccctactcaaaagaagagtaggatattaggtaatttgaaaaataacatttaaaaagagaaaaaggtcacatacagcaaaacaatattttactgaaatcgttccctcaagctggttgctacccttgcctgacactttttggtcttcacgtaggaatgcacacatacatacattgtaagtgtatggggaaaccatttccactttatttaggctgaaacctaaatcgcaggattgcaagaaggaaattgaggagaatgaaggctttattattatccttttctttcttaaatcatcttccttaaaacagaaacataaggtcctcagccgcggattttagtgcttacttggtcaccaaagggacgtgcaatggactcaagtgtgggcctcgaggcttaactaggaaggggtgggtcggggacccaccaggtgaaacagggcaggagcccatgcagcttgccaccttcggccaggccttgcagcccggcagccttagtagacgggtacagagggctgagctctgcagaccgctctgctgcgcaggagcctgctcggcgcatcccagccggcgggaggcactggagggccaggaggcctgaaacccgcactgcggaaaaaccgacctcagccacatcctcatagctcacgcgacggaaagaggcagggcggtttactaaatcttatgcagtgaaaattcgccttagaaatcgaaggttggatgagtcagtattgatatattcaaaaatctaaatttcttagcatatttcatcgttcttagatgttgaaagtattaaatgtaaacaatacaaatttaaattccctaagtaatgaatcaaaatggcaagggagagagagagagagagagacggaaaatcaaccaattcgtagccaccctggctggctatttctcaaaagaaatttctatgcatttgcttgagtttgtctataaattcacaaacataaagggtgttaaaattagtaacagacaaaataattcaggttggacaatagagacagcaacaccgattttgatccaggtataacaatgggccatgcattgacaatgacctaaaagacatgtgttcattaagttattttttttacacgggatgtagatgtatcataaaattcatgaaataaagcggccaggtgcaatatcctcagagagctgccttctcaccccctgcctcagggcggattttatctgtcctcgaattttagaactctgcaagtcgggtctttcacattcatcgattactttggtttatatttaattttatccaatttcggagtgggtgggtaaagcacactggaaaataggggctgctcgaattacaaaatttaaggattgggaatattcctcttgtgccaattaaaagcagtcgttggaagcagaaatgaatttaaagcattacacgttatcatggcggccttgctttttccttccagtattcatccaattgcgctgatctcctgcatccacatcttgcgtaatccacaaagcagctatggtccagggctgcaaaatcgtcctgcctgattcctttagaattcatactacctcagaggagcaaacctaatcccctcagcctaatcctacctgtttaggatcatctaaacttgtccttcagaaagcttgatcagtttaaaattgctttctaaatagaaatgaaatacgtgatatgagagaggttaaaatactgcttaaaaagggaaacactcaatttagtaattcggttgcctagatgaaatcgagtggctattgatccgtgatgtttctagatttttaagactatgtacttcctatttctttggaaaataatcatccagtttgatgcccattacaaattttcctgctatgaaagaaattctatgcgcggcagttttgcaataaaacaacccgggcttcgcaatgggagaacttcggtgcggcgtgccgtgagagtcctttgacaatctcagctttcatctaggtctgaaattaaagcttctcggaataatttaggaacagcttgacccgttgagatactcaaggacaaccctccagggaaatagtatgtttccttcctgggaacaagatgctagcgcggtgcaccgggaggtatctggtgtcaacaatgccagagcgccctctgctgcctcaaagaggcaggacaccagttacaaaagccagatggcacagtggcaataagcggaggaaacattaagctcttagaaacgtttaatctgtgaaatttaaaagctctcatcatattctacttttgaaagggccacctgattttgattttgagcactccttggatgttatcttctattctggaggataatgaaaagtccgtgttttgaagttttcagattatttctgtagttatatttctccactctttctcgaattttatatggaaatacgaaattgcaaatctaagtgaaaaacctttgtgtaaaacaggtgagtggagaagacgtcctggtttctccaaataactaagatctaataaagaaacaaatcttaattaaaataaagataccgagcacatgttgttgtgttagtttaaaacgataataaaaagaaagaaattaagtctcgatgtaaatcattgttttgttgttttgtttcagtgattaacccaaattttgaccagacttgaagttttgaaataagaaagtgaattattttaaagaagaagaaaaatttgcttcttattaatatgtacaatatttttgcccttaaaacctttgcaatacatttatacacacacactcagcttgcaaagccttctttagaaaataacccactctgagtagaagtaatgagatatggtagcagcatgggcaaagccataagaaacgttatttgcattaaaaatgagtttttcagtatggaaaatcaattaccaaatgaaatagagattttttttaaaggttcaaaccttttcaaatttttatgttatagggtttatattgattaaaataaatgtacgtttgtagttattcaacattatgaatttcaagatggccacctattttgaaacgcacacctttgccatgaagtctgttgttgcatatattagtgctgatgtaataaaatgcttctattaactatgtggttgttaataaatcttgtaaaaataaagttctgtttattttatggtgtcagaacaaaatagctgtttaaaatcacttattttagtcttagcttttaaatcaaaatgcctataagaatattaagttctaagattgttgagaatactaagataaaattaaaaattgtatgattttacaatttgctataatttaaaaatcttgtattgattaaatgttaaatcaggttaaatatttgaccaattgtgtcaagttccgtataaatatgggtacatttgtcttctgaaagctatttctccaaagaatgcacttacgaatgtatggcataataagtgaaaaaatggtagaacttttatgtttttattttaagtatccttttaaaaattaaaaatattttttttcttttacttaatttaaatttcttcctaaataagtgcatattttacccaggagaaaataaacagagtgacataaatttgctatacttcttatagttactataatcagttaaaaaacaacttctaggcaaataaaatatataataaaatgtaaattaaaatgtaaataaaatgcaacaaattcgtgggtggaagacatgaacatgacttttttctattttaaaaaccatttgatgtattctaaaaaaagaaaaagaaaagaaaaacagaagagaaccaactaaaagagcttcccagatgtccaatagatgctgcccgaagtaaaacgcatactctaatatttgttattcaaatttgcatgtaagggtttttaacctccctttattttatacttgtacagggtaacgtattgtaactgaaacactcctcctaatttattctggctgtgaaaagcctatggaaacattcacttccataggagtaatatgtatctaaacagtatatttagggaaagcactaatagaacacaaacaactaattactgatgcttttaaggaggaaccgcaacaataattgtgcactgtcttagataaaattaatatagaatttaatatttgtagaccacaaaaaagccctaatcgtggaccgcagattagaaagaacaggctttagcacactgtgtatctttgtagtattcagactcagctgccactgcgatttccatcagctgctgttaagtaaataatatactatggaaatatgactgagtaggaattgaaaataaaatgctttaagaaggaataaaattgggatgtcaagaaatcaaagttgattgtctttaagatagaaggttagtagttacaaactgcagcgaaaatatatacattgatgagcaaatctccacgaagtaaaaagttcagatgttggatactaccaaggcaaaatagagtgaaataggaagaaattaagtctttgagacacatgtagaaagaacaaagaagcctcttgacttcaattttgtttttaaaattccagtagaagatgtttatgcagagaaaccttaaggaattcttcattgtcatgtcacaattttgatcttgttgaattaagaaagacagggaaaagttgaaaa

SEQ ID NO: 370 - DNA, 470456 bp, Homo sapiens
  source 1..470456: mol_type = genomic DNA
accattttttctagtgcatccttaccaataaaaacctctggtacctttctgggagggagcaggaagggccacaggggctcagcctgactccccttgtccttgccttgcaggcccagtggttctcagcacccctgcccagctcatcgctcccgtggtggtggccaaggggactctctccatcaccacgacagaaatctacttcgaggtagatgaggatgattctgccttcaagaagatcgacacgaaagtgagttaaagcgattccatgtacagtattggtggctttgtggcaggaagtggttttcaattttgtttggttttacctgacagtggaggaggggagcacattctcctctttctcatagaaaataaaatgaatgaaatagcatgttctctttatggaattgaagaatatattaatgaatttaaatcctgtattaccagagcatgcacattttaacagtctttctatgagtgcctttgtttgcatttgggcagatttggtagttaagccaattgcttccaagtccctggggcccagaatctcaggctctgaggctgactttgaaaggtcttgagaaatttcttattaagatcacttttaattttcaaaactttatattgtaatgtgattattgaaaagttataaggaaactggggggagagcatttagatataaattaatctccattagtacacccattttgtccatctcctgaaataagaatgggttttatatgtggatttaagagaaaagcaactgattctctgagctttgattttaaatatatatgctagcactcagatgtttaaatattgtattctttggatataatgccagaaaatacaaatttggaccatttaaatgcatatttattaaatgttattgtgtagattttaaacaccagagtattagagtagctctttctcagcattttctgagatctgttctaatgttttaactttcatgttactgtgcaatttgcaaacttctattctggggttaagaattcaacagcatgaagtgtcatgctagaaattctagcatcattttgcaaagatcttcctttattttcagaggcagttattctaaaatagtcaaagacaaatgctcccacagatccagaactttattgtttttaatttagatattgaaataaaatgttataaaatagtatttgtagactagagctgaaatccaaaaatttaccatcacctgaattaactaacttaaggcccataggtgatcagccttttcagcacttgttgactactaaactcttccaaaggagagccatgggacttcttttacttctagctgcaaatgtagtttttaaaatgagcttgaatgcactgtattttattttaaaataacttaaattttgtgttcatccttttattagcttgccctatgaagtcaaaaagaaatgttgaatttctaatgaatttattctgctaatggaacccttattacataaaataaggtttgacataaaatatattggtcagaaaggatcgttttattagttttcatacataattttcgaagtttcattatgactttgttaagttcatttcctctgaattagtcagatttttaactcagtcatctctactgtcatgatagactttttttcttatattatcaaaaatgctacaagaagagcaagctttcaaaggtagatttaaattgtttctgttgtagaaaggaattgtcttacaagtaagttagagactgagagtagattgttatcttatggacctatacagaaagagcttttctccaatgttttatttttaaggatttcattagcatatttctcaaaatatttaagatattcaagtgggtttgattttcaaaatgcatcattacatcttgtgataggaaacaatttaaagtgagacacaacaacttttattttacttcatttattaccatctaattaaataaaaaccagcaacaaattaaaatctaaatcacaaaagtaattatccagtgtatttcaagtgcatttttcaaatatataattcagatattcaagcgttattatataagctgaattcaaatttctttgaatatatttaaataacatttcaagtatatttatggaatgttagaaatagaacaagcaatatttgaaacaaaatgtaaactttttaaagttcagacactttcaaagacagataaaagtaccaggaagaaatctacctttaaatgatatctttgttagtggaaaatgtctggaagtatccagaatggcaatttaagttctgttcaccaaatcacaaaacaccaacatccacactttcaaagacaatgtgagatcacaatatttgttacaaatcaaaatatacattacagtttctttcagatggcatatccaaatcgtgtttactcacagacagatgcacctaaatcaccaggattgctataatcctttgatagttaggcagagtgttcgtctcggtctggcgttacagctgggctgtttacggagtgttacggtgtacttttcaagggagataggaaatcgtgtggaaagaagtcttctaatactagtggctttgggtttttctccatccgcttcccctactttttctccccttgtgggggtgggtgagatgatgtttaaatattgtattattattcctttttaaaggaagagattgtttgcactgcggagtggaatattaggaattgaacagaagtttacacttaataaggactttgagaagggtaataatttcggctcttgattaaatcatcctctaaagtttttccaaacttttcgggttggtcaggatctctcttgccagtcgccacgtttgtttggcagcgttttccagagctgagtgaggtttgccttgaaacagatctaagttcggtagaaagtagtggggacaccgccggcactgcaggcaggagataagttgcagcaaaatcccgttcagccgatcacccaggcaagactcgtcccagtccgactctcggggatgcttttcacactcgtaggaaaccagagtcttcatatggtaattgttcaagggctggcccggcagttcaaggtgacgatcccttaaggttttgaggatggagaggcacttctttctgcagccccccatctgcagtctgttctctgcctccgcgaactgcagcacccaggcgtcgctctccgccgagctctgcttgccggccaaggagtggcactccttggacaagagattgaaaccttccgccttgacctccgccacccggttgggtcccggccaggggatgtggggaagtggccagtgggcagcactcctcggccagatcccggtgcatttaaaggccggcgtgatctgcaccacgtacctatctcggattctcagtttcacttcgctggtgtctgccaccatctttaccacatcccggtagctacatttgtctaccgcttgagccaccagcgtctgaaacctggaccggattttgcgcgccgagaggtagccggaggcggtaatgaattccacccagagggacatgctcctcttgcgcccgtcgctcaacttcagcaccgcgcagccgggcagtgagccatcgtccacgaagttgaacacccccatttggttgagataaagcaccacttcaaattcggtgggggagatgacctcgaggccctcgtagcgattgtccatctcgttgagagagctgatgaaccgcggctcctgcacttccacttccttcagtacgtcggaaactactttgcagacttcccggatagttttggcaatggcagctttcctggcttggcatttttcgttgtagtatttattcagatggtagaccagcttggcctgggccgcaatcatgttggggcagagatccggattgtacaccggagtctcgcagtaagctgtgggatccaatgcggctgctagagctggagccaacttcggtggagaaacgggccgcaacactcagaaatggatcaaaaatgcctttcggaagtgctgcagcgttggtttccctgctgctgctgctgctgctgctgctgctgctgctgctgctgctgctgctgctgctgcttttcccttccttttatctttgagcccagccgttcttaaagtgaaagactgtcctcccccctctgcttgtctctcttcctcttttaaagaatccttgtgtgagagaaccgcatggagagatcaccttctcaggaataaaaaacaaaagttgcgctgagacccagcaaagctcttccagtagtcaaaataagcacccctttccgtatttatttgcgctttcccgtaatcattgtgtgtgcagcactgttaatcaaatggaggaaaagtgtgctgagtgtgtgtccggggtgagtgtgcgtgtgtatatgtcagaagaagctgctgttggtttgtctaagagcccagatgcactcgtgtggaaattataaaggcagggccaggcaggcgggcggccaatcgccactgggctcgtcacgacagcctccttcagctccaacccggctaattaatccccactcatggatataggcacacaaactaaaggtaggaggctgctgccggcggaaaaccactcaggccacctagacagtttggaaatcaagaggaatctctcagctttggtattacttgaagcatattgacgttttgaaaagacttggcaaagcggctctcttctgtgccgaaaacctgcttgtcttttaccgctgaaatgcaaatacaggtgtattaatgggcatccatcaattagtgatcttgacggggttttctaaaacaaaatcactaacttgcatttagagtaagataattaacgtctgttaatccttggggtcttcttaaatgcaggttgaaagtttgttctttcatgcagactactggcatatggaagttggctttagatggaggagtacctgtgtaattttctcattctggatgttcctatatgttaaaatgattttttgaaacgttatggaggtagtatgctctttttttacttatgtttttttcttttctccatttgttgaatctgaaaattattgctgagtgtgtgagatgttctacccctgtttaagttaggatatttaaaaaatatttcgtacatccctctgccccagcagatgcagtctttgcactttggtggacttgcccagcattacaagcaggacacaacgctatatatgcacttatagaaacatttgaaaaataaattgtctgtgggatggacagagtactttagcgttatttcatagtgacctgtattttagtacataaaattcaggtgagatcatagagatcaagcttcctcacagataactatcccgaaaaattgaaggtttggggtatctggcttgtttacagatgtataattaaggatatatctcctgtcttaagtgtccttaagtggtgacctggcagtagacttctaattttatactatttcgtgtgatttaattaagggaaaatggttaacatttgcaaagaaaattaacttgcagttatctggggggttttttggatttaaacatcattttgaaaacaaaaatgaaataaatcatttcatttctgaattttggaacctggaaacaggaggaggaatttttttttctagttggtggtccagttgtgtcctcaaagtacaggaaactaaagaaatactacttagtggttacgttgtggtttttaaaactaggtggatttttttaattgtctacctttaatttagatgccacgtctttccaattaagaatatttcccgtcaaatcctataactcccggtaacatgtttgtagacactttcagagtcacttttaacaagatattcttcagggctcccacttgctacttaagcttttgatttttgtttgtgtgttttgttttgcacaggcacagcatcacaaaaccacctattatttaatttctccttatccaacagtgatagattccaatttagctgaaaatagtatacattggggtgcgtggcacccagctactctatttcccaagaaccttccatccccttaagagcagggtctgggaacacccaaaaaacccctccccactttgccgtcatcgcgggtgaatgcaccactaccttttggcagttggaggggagacccatcagagccggagaacctgcagccacgacggcgaggatgtgcagtggtctctggggaaacgccgccttctgccctcacccggcgcgtgtggccctgtgccgtccgctcgccgcctctctctcgctgctccgcattcccgtgccctcttactttcctctctgggctcaagatcgctacgctttatttctgcgtgagcttatttgaaaaccttacttggtgtcccggcttactctccacgtctgctccagaccacggtctgcccacgcacccctcagcctgcaccgcccacgtccggcccaggtgtggtcgcagccaagccccagccgcgggcccctgcgccctgcgctctctcccttgggttcaggccagagatgcttgccccaagacctcgccccttgccttcttgggccacctgcagaacacccttggttgtcaaggacgtgagacagccgaggacggggaggccccagggctgttcgggggaccttaagtgggtccaacgggaaggacgcgggcctgcgagggatgccggtcgggcctggctggagccaggcgcgcaggtggcgcatcttcggggctcactgtgcagcttaattgggttaaagcgaagctaaacaccgaagcactttgtgcaaactaattggtgcaaccagcgccttttcactaacgatttgcactttgagaaagaaaaatggatggtgagaaaaggtatactaggaaactcattagatctagagtgttcaggaaagtgaagtcatttagtttaaaggacgccaggactgtgttttctaagctgcttccttaagcacccctcacacaaggagctgaaggtgatttacataacataggattcaccggtccgcgattatcactgtgggtgaactgggcgccctggaatgaataatactctagtgcaagtactgcttgttgctgcaacacagtgattttctattacactgaacacgtgaaatgaattgccttctgtagctgaatcctttcagtgatcgtagacgcccctcattgttgaagcgagaattaagctattcggagaagcgtgttttccatccccgaaatttttttatggaaatgacctatagagagggattgcaaataacagtacatttttgtgcagttcagccgattttaatctaggcttgggggatatatttattttatgggagtaatatatttaactatttttcagtgaattttaaaaaaatatcatttgacctattaaactagttatgtcaaatgattatgtagtacatagagatggcttaatatacatttatgtattaatgtgaaaagtttttttaaaaaactccagttataccagtcttgcaatattttttgttgtaaatatactcagtgctactagaataaaattgtgtgtgtgtcatgctttaggatgtaaatacttaattgttttcagtggtaggcatgcagacatctttgacatgagctaataatagaatgataattgaggaaaactggcctaattgaaggaaaaaaatctcaagaatctcatgatttaatgatagtttgaaatgcttatattgaatggtatttagaattttaatgcctaactgacttttacattgcatttacttagtttatgaggcaggctcgatttaaaatgtaccagttaggaaaaaaaaaaaaaaaagcaataaggacatagcacaccattatcataaatgttagtagtattagtgaatataaaataattaaatattgtgatccttaacacttcgaagcgttcgaaataacagtggcaaaacaactttgcctcaagtagtatttcctaaataacttgtctccacttctgcagacctgcttacttatatgggatatacaaagtaattcataaatagtgtcattattaagcttaaagaaaaaccctgttatgttgagaaatacaagaatgcaatatttctttgttttcgaaaaaaacctgatttaaatttgaattgcatgttcacaaatctcagtaattgtaacctttcatctggaaaaaaggtatctgttaaaggatatgcacatacatgttaagtgcttatatagatattgtttggtgttttttcattatctgctagctgctagtctattcacaagtattaatgaatttaaagttttatttttttaatatgtgcttattacgctggggagataaaaagaatatgaagttgagtttattacattatttatccctactgctggagtggctttgaaggctcattgtagccatctgatttctttcccccttctttttttttaaatgcacccaggctatttcaagtgtttcattctgccagacacaatatatttctttttttacactagagaaattaaagacagatatttgtgcagggttttctttatgtgtcacattaaataaagtaaaatagagagagtttttctggtaacctaatttgatggcatctatacctttcttcctgtgtgattcctggtataagaacacttgagacaaaaaatagcttgaaacctttcaaggtttcagtgatttcttaaagtaattatttcatcttttaatatcagatttatttcaaagtcaagcagaggattgaggtcactgtttgcacaatttagaccctattttatttcttcaactagaacattttgagaatcgtggttaattttttagaattgtttattcttcacttgactgataaaggcctttgcctcagttttcttcatcaccctagttcacaatcatatagtcacatttgtagtgaagagtactttttttctctacagtgttgcttaataagcttgatattggtattaataggtttttgaaaagaaaattttgagattaaaaatggaagttgggagtatacttgtaagaattgaccaccgctgcttgatttgcagacttgaagtaatactggataactagccaaaacttttcttttggtagaaaaagaaatttaaagcctggcttattttcataattgtctctgtttcctcacttcatttgcatatgtacacagaggtacaggatgttttcagttgtatctgtaaactgaaaaaaaaatggggaaagggaggttatcaacctaaagaattttttattgttcagcataaattgtgatctctaaccttttccaaacatttaaggacaatgaagttagtcattcatttattgaatactgtgtaggaaatatggattccaatagtctaatttctcacaaacccttcagaaagttactattatctttctaataaaactaaaatctttttgttagatatcagcttataattttcttgtgatattatagaaatattcagacaggataaatgggctcacatgattcttttctatataatgtatgaaaattaggtatttcctaacctacaacatatacacaaatgtatgtatgattttacatacatgaatttacgtacatttgtgtatatggctacatttttagtactcttaatatgctatctttttattgcatttagagaaaacaaaggaatcagaatcgattagtgtctgttaatccctacatctgtactaggtcatccaggactgcattgctctcattactgtttcatactgtatgtgattaagccactggaaatattcaacatgaccttgagactagaatatggtacatagataatcaacttccagtgattacatgtctaaaataacctttcctatttttaatttatagttttggagcttattttttaatgagcaaagtaattcttctaaagtaagatttattttttttaatgattagtaactggagtaataatttaaaaggataattacataaaatagaaaacgattaccttttatcatgtatattatgtgcagtaaaataaatggtttacagaaaaagaaggaaattagtttataaatataaattttctttatatctttacatataagtatagagataactatctgagaatataatacctatataatatttcatttccagttacatttcaatattttcactattgtaataatatacattttagtacaccaatatgtactatttcttgaaagcacactttttcatataatgatttgtcaaaaatatcaattctaaagtaatactaatgaatagttaatacttttacattcacatatccttatccattttattatctaaaatcccaatcaaattagaagcatgaacagcatagtttgtaagatgtagtggtgttcctgattaaaaaaaaaaaagtgggaacctagtgaaataaaatgtatagctttgtttttctgtgaaatttattttttttaagttagatatgtctgtgaaatttatttttttaagttagatatgtcgatgtgtactttgcatacagtagtattccatgatttttccatatgattgtgccattctatgaattctgacaaatatataccatcatagaagctctaccacacatgtagatagaacatttctattaccacaaaaatgtttcttcatgccctgatttcattatttttatttggaaattttatgattaatgtataaatgtctggctgttttagttttatatcaaaagatctttagactgtaacaccgttatttatttcccctagagtttactattttgtcatgcttctaattaaagacaagttttaatcaaaaaacactgacacaggcaaagtgtaaaataatatttcagatatataagcaatatgtttataatttttattttatgtaaagtttaattttcatgtatgtgacaaattaatacttggtagaagattgatttttcaaagaaactcctaatatttagtagctaacatgaatatatgtgttagatttatgaatctgatttacagcttacacatcaaaatatgcaagtaagaatgggtttctcatataagttagcaacatttgaggcatatttgtaatgtttctagctttatggcactagagaaagaaatgtcaagatttctcaatatttttactttacattttcagtaaattaaccttccctttgagtggtaggaattgaggctaaagagtttattagatctaatattacttaatatatgcacattcttgggacatgtgtataaatatacattatcctaattttgtataaatatacattattatgtaaatgtagatggttacaaatactctaaaccaagaattattaaattataggagtgaagacattgataatgatgctctttcaaatattttgtctttttacaacttggaatagtacaactagtcttttatttcttcccccaagatatacaaattatttaaatgctttctgttttgtatttttattttgcagttacaatagaaattttaatgttatgcatgcttacaggcctattaagaaagaagttattgctttcttaataatctcaaaccatctttaggaaatacactctttttatggtttgcaaaatagcccatgcatgcatgcaggctgtgtacagacacacacacacacaaaaacaccagtgtttaagatagcaaaagattgaattggcctctatacattttccgtattcatctgttaaaaggaaacaaccactaaatattggaatcttgttgccaccaggaagtaatatccacatccacaagtttgtctcataataacccttaacagtttttgataatacctgaagagactgtacctaaatggatttttaaaataacacgggaaattccaacagcatgtattcagtcacatatactacgtcaactttgaatgtcataagcttttaattatgaaattgagaagtttattgctagccattttgtccatagaaaaaatttacttaaatatttacctacattaatatgtgtgtgtgtgtgtgtgtgtgtgtgtgtgtgtgtgtgtgtatatatatatatatatatgtagaccctcactaatttaaaattgttttttacttttttgcaacagaccaagtttaaattttttgcaaccttaacctgcatttgataaacaaaatgtataactcttcagggggaaaaatgtgggatgttttgttttttgttttttactggcaatttcagttcttcatttgttttgctctccacgctgcattagcacagttttcccctgtgtgcatctgccagtgtacaatttagccacgggcatctgtagaccttgtggtgatcagtattgcaggcaaaagccatatgtgtttaaataaaaaaaaaatctctttatttcatttgctgttttaactggatggataacttttgtgcctcaagacagaaaaagaaaaaatacagaaataattaattgcctctattcttgaggcagtttcatttcccctccaatatggaatgcttgtcagctttcctgataaatgactgcatgtatttgcatagattttacattaacacaaaaattagttttatttgtggaaaactagtttacataataatataaaacccctgttattgattatgtttccaagcattgatgactttagaggggtggtagtattctaaattttcaaaagtctgatcaacctgtataatttaaactttcttttgataaatagttttacattaagatctaaaagacatatttataacattttaaagttttaaaacttcttttctagatatacttaccacaactgtttcagactcatagtagcacccatttggtaagaagattttgattttgaacttttgccaaggaatatttttaaatacatattaccaattacgtacacttcagccaattggaagactgcatctatatgaattactttaattttcatattcatattatgaaaaaagatgggtgctatattggatgtgtacagtttagctaattcttgggaagttatgtattatttacaaccaaatttaaaatatatctgagaactgtcctctccatctttaacctatttccttcaatatacttaattaatcacccagccctgaaaaaaccactctgctggagctgttagggtactgaaaacaattctacctctctaagtggcaggcagtagatgtttattcatactataatctggcatcttgttgtctagaggcaacctgctaattatgtgctatcgttgtattatccatgttatggaaaattcaaatatgttcactactgttagttacatcgcaaagcttttcgtaaaatatacttgatcctcaagaaacctactatacttaatggcaacctaaaccaagagtgtctctgccacttcttgattctgggacaccctgggtgccagctgtcacagctcagctaatgatgacaaatgcccctctctatgcagattgcagagcttgcaggctgctgtgaaaggcaaccagattacctttcttcagatagtaacttaacctttaaaactcatgtcagaatgaaatgatcagctgtgatagtttcaatatctgtatctttaaaaacaaaaatcagaataatatcaaataatgcttttaaaagtttccagtatttgtatgatttacagtgttttacccttgaatgctgtaatattcttaaataagaaactctgggtaagacatacttcacaaccactttagagtgtgtatttgaactctgcgtataaatcaggtaataggtaattgagaaaattctccagattgtttagtctaaaaaataggctgatgaaattttgagggaaaatatgttcttctcttcacctgaatgaatggtaaagcctcaattctcccactgcttgtacaagcctagcctgtcccaagccaatagttatattatgtcattaaaacttagttattccaaaatgatttagagaataattgttgctaatgattgttttctctgggtattttcaaatatgatcttttaagttattaatttgttctatagaaatttatcatattacagaacctatacttacatggattattcaaaacaataatgaacaccattaaccataatgtaattcagagggataaattacctattaaatgagataatgctttacaattgcaacattcttttcaatttacaaaggatttatatccattaattcatttgatacttaaaataattctgagctgggaaagatgggtgacaaggaacagggaccaatatttaatgagtatttaatctcatttaatcttcacaacaaatattagctcccatttacaaataaagagactgaggtttagaaaggttgcatcttaccagggtcacacaggtaattgcagagccaggtctgtctgactgtggctgccatcagcattacagtttctagactacatatgtccatagccagatataattcatagaaactgctactaggcttgcatttacataaacaacataattgatgagttttaaagataggttctttataggatgcttttaaataggtaaatactgagatacttttatgttataaattttaattttataaggataatgtattgatctatcacattgggagaaactatttaggaaagatatgtactgtttactgaatatcaaattggactaattcacctagataaccacttcattgtaaaacttaagattaatgggatatacctttataaatgtgatgaggagaagcaattatttcaataattacttgagtgaaatatttatatacttttcttttataaaggtttatccatatcatagttttactatgtaatatcagtgagctataccacccacaatattgtttttcagctcaagacacattgaaaacttcctttgatcatgaatttaagtgcagtcatttccaagaaagctatgccaatgccagttgtatttattctgtagtaaattattctttggtatagatactaaaatgtgaggaaattttttcaatgatacatatgattatattattatataaagactattttatgtactgattagtagaattatattagtacttatatagaattagtacttatagttactaatcagtacttatgctcaatttgtatttcactctacataaaaattaaaacttacagtgaaaattttactaaaatgtgtcatgcagttagtatcagggaaaaaagtaattctgccgcataagtcagacattttatatcagggcaggaaagaactctggaggataatgcaatgtaaccctcttcataactgtctgaatcttctctacaccattaccagccatggtaacaaccatagccagaggtggttatctaacctctacttttacctccatgaatgagaaacttactacctactcagatagttaattgcacttacaacagttctagtggttagaacgctcttcctaatattgaaccaaaatatttccccttgaaactttcaccttctggcccctactttcccttctgaatagtattatccctttaacaaatatatgctttttaaattcagcatttcagataccaagttgaacatactccagtctttcagctattacacctttggcatcttttaagtcacctcactgttcaggagccattctggtacatgattttcttcaagtacggtgcctagaaagtattactcctagaatggattggtacatgtaaagtggagaataatagcgaaacatgggtcacatgagctttttgggcatatccatacccacgcagataaatgctgtatgtcaacaaatatcttatttgtttaaacatattattaccgaggtcctaagtacatgacttttgtattcatccaactcatatcttgctatttttaggtattttttccgtgacttgacttataataataagttatacatcattattttaagaatcaataggcataacagttctttctaaaaatgtgttcataagctacacatagaatattcagagcaaaacaatctaactttaatgaatttaatgtttttgctcagtttaagtgtagaaggaagctaatccacttaataagacctcaggatacattgaatttactaaatactccacagccttcgtatagttttttttccaaatatttaaaatcctaatattagtttttcatagctttatcgaaatgtgtaactaagaagcctcatttgggataaagtatatactttatgtattttggcatttatcaattttgctttgtcaataaattttgtatctacaaatgaaatctgcaggtttcccacatgcttgatcaatgactagcaaactaataaactttcaatgcaaatagatgtgcttctaggacttgtagactgttataggaatcaccaacatattgatctacatattttaaccttttgacaataacaagagtttctaaataatttagcatgagcagaggtaaatacttttaaaaagtgatatttttaataacttgaagccaatgtgaaaatttgtaaattaaaccaaagtagtcacaagacccattatgctcagttgttttcttcaagtgcagtgcctagaactgaatattcagtatcacagagtgaactggtgaatgtagggcaaagaggcctcccttaagtattaaatacattgttggaaaaaacgtattctgagaattctcaaaacacatttgagaagcagtagtaaaatacaaaatgcattttaatatatattaattaagtaatttgtaaaatacaaaatacatttatgtctgtatgggtggcaaaaaaattgcattaacttttttgtgttaaagccttgaatttctttaagtgcaggcgcatgtttttatttgccaagttttttttttaatgaggatgtttcattactactttatttattactgctgtgacatctaggcaataaaagacaaagacagcctgcctgaaatttggctttcttgcagtttgtatcttgaatggggaataaagaagtccagtgcgtttacaacagaaacattctcaagtgaagagctgccccatctgtttcatctggtggcttatgcaataagaggtgttatcacatgaatctaaatgcacaagcggtcgttttatgaactctttctgtgctttgaggagtttataagttgcctactctattgtgtatcagtcccagctgacccaagtgcattctgctgggcatatttgggggataattagaactaatgaagcctggaatacagctaattctctaagtgatttattcttatgctcttctctgatccctaagaattctccaaatcataatctatgccacttattttttcctagcattgtgttgatacagctactttatgcttagctgatggacatcaaaagtaaattcggtatttgaaaggctgagaaacatgtttcaaagtaaaactttacgttacttattagtccccaggcttgagaagaatgccagttcttcaacattttatgtttttgtttaaatctcaaaatgtttatggcacttgcaagtagataatagcatagaaaatataaagcaataaaagctcattaaaaaatgtaccactgggaaatcaaacctacaagtaaaataattgaaaattattaatggaagtttcctatttcttaattaggtttcccaaggaaatctgaagtttaaaaaaaactttatgaatagctttcatgttccaaagctgtttcattaacctggcttcactgtcctagcagtgttgaaaatgatgtttctttacgtgccctcaccaagtagtcagtgattcagtggcctgtaacgctgtaaatcccatcaacttgctttcctttcctgttataactgtttcaatgagtggcacttttgttgtgcgggttcagatctggtagcttactgagggcacactagaatgaggacagacacaaatgccaacaaaagaaggctataactttattaaagccttatactcagtaaataagatagtggagccacttcagctaagtagttttataagctatgtcctatttgatcttctgttgtctagaaactatagtagaatttattaagaattgttagttttacctattgattccagtgtttaatatttaccatattctagagcccagataacaaaacccttaagggcaagtaccactttattagttagacatactgaaatacctgtactaatgtagatcaccaactagactgattatcaaccaaaggaccagttggagattcctgaatctcattacaggatacctaatccagcctcagataaattctagtcttaattgtataccctgacgtaagaagttactgtttctcatattttaccttctgcctaaaagtcagctaaacactcgaaaacatgtcttaggaacttgatgaaaagttgcaggtcatttttttaagaacatttttacatctttaaacaagacaaagaacaaattggtaaaattggctaaaactgagtttttgttatttgcaagttattctgctaggtgctttatctatattactgtatgtaccttcatcttctcaacactatgaagtagaaacttctggcctcatttcattgttaagaatctgaaacacagagaattcaagtaactcttccaagttcacaaagctaggagttagcagagttaagattttcatctatgccatctggccccaggctccagagtgtgctttcttagtcatcatatagaacctctctaagtttgtcttgtcatctgtagaacagggataattctgtgtcatagggttgttgcacaggttaaataaattaatacacataaaagtttatgtgttttaaaaagaatatttttaaacttatattacccaagaccacacagtaactagcaaagataggactcaaacccagctttttctatctccagacttctgagtttatgtagcatcatgcttaggtatgtttgttgaatgaataattaaatgaatatcatctgttctgtacttcccagtggaagattttgttaattttgctggttattttgatagcatatagcaggtactcagtgcctgaatgagtgaaggatttttcaaacaatactcgccaatataatatgttctatacattgatcactcttaaatttatatctctagccaagacctctccccttaatttcaagctggtatgttcagtggtcttctccacatcatctcacatatataagatgcatttcaaacttagattcccaattgagcacctgcttctccatcagtcatctgtacctcagtaaactgcagtgccttttttccggtttcttaggccaacaacatggctgtcatctttgactcctcgcttgcttgtgtacccaatatccagagtgtcaacaaatcctccagactctgcccatctctcaccaactttacagcttccatccttgcaagccaccatcatctcttaatttatttttggtgcccattatcctgtatgtgtactactggttatctgaggcaatatagaatgagaaaaagtacaaggaattatgctagggaacatagcttctcactaatattcctctgtgaggaatatgatccaataggaataaatgagaaggaatgttcagaaaagtaaggcggaaaactaacagatatgactatcttaaatgccaaacacaagagagttgtaataaaaagttagtggacaacagttcagctaccacatagagttcaaataacataaaaagttctttgtctttccacatccgtatcaatggaattgtagagacagaagcagatcacaataggattgaagagtaaatcggaggtggaaagtgaggtagacaatacactttcaagaaaagtaggattgaagactattctaagtgaagtaactcaggaatggaaaaccaaacattgtatgttctcactcataagtgggagctaagctttgaggatgcaaaggcataacaatgacacagtggagtttgggaactcagggggaaagggtcagaagggaatgagggataaaagactatgaattgggtttaatgtatactgctcaagagatgggtgcaccaaaatctcacactaaagaacttactcatgtaaccaaataccacctgttccccaaaaacctatggaaataaacaatttttaaaaagtagaaataaaggaaatgcaagagatagtatggtaattatgaagtgatgcaagaaaaaattttaaaggtatttgaacatatttagggcatagagaaagaagccatagaggagaggttaaagttaaaatgaaggactaaatcatggaggtctctctatctccaagatcagtagaaggaaatggtatcattgtcttgaggctacaatgagagatggcttttttccttgaagataaactctacacaattattaatattgcattttattttattccatatgtatttgtaacagtggagggtgagatgttgggtttaggataaacaggtggagatctgaaaatgtagcaggaagaaactgttgcattgtggaagataaatttgtagatggtggtttttaaagttggtggattatacaactaggcctcagttttctcttggcacttaaagcactgggactgaggtaagcttcaagaagggacttagatgtttaaactgtcactaaaaggaatgggagataacgatgctgaatcctgctttacctggcaaccctagatgaaggagaaaagtagatgtagtaaaatttctaaatagataagtgactgagatagcttaaacataggcagaatagtttactaagcggaatatggacacaggcatagactgctgaaatacaaagaaatcaaagaattttaagattaaggtacagaatagattgtctatatgaatactgaattctctaaaagtgattataagattctgggtggagagggaaagaattttggggaaagaagacccatgaagagtagaatgaatgctgttaagtgaatggaacaggagacaatctgagtcaccagagcctgcacaaaacaaacaaatgggcctaagaggggttgctgggattttggaagccaaaagataacttgatgaaatcctttgtagcctaatgctttgaatacttttgagagatttgataagcagttttatcatcaacaactaatgatatgggagtttatttaaatttattcctggagccagggaattcatagactcttattttaaaagaccctaacattccatatgaaagtgttttttaggtgtctgcccaagtgataatccactttagtatatctgtttccaatactaccaaagtgtccatcaggatattttggtaggacctagtcatatgttttatttgaagtatgtaaaactgccaaagatactttactcttaagtgttttcatatcatataactttctttagtttcccagtagagtgaggaagccctccattaggaaccagaaagcttgggttttagagcttgctcctttttgaatagaatatacaatctttattaatgagcttagtttcctgccctgtgtgatgaaggcattggagtagatgatttcccttctaaaattcattcagttctctgtattatttaactttgagatgagtacaaaatagcagcagttttacctttaaaggtgtatctcgtcatgtgcaacatataccttcctgaaaagttagcatatttttattatttgaattatatttaaatatatctgtgaatttattcttcaaaggatccttacaataaatcttttaaaaatgaattcattttataaatttaatgatttctttataatgtataatttcaaatttaaatctttagttattaaatatttttaaaaacaactctatatatttgtctttatgtaactttataaagggtataatgaatatgaatataaggaatacaaaaccaatgataagtaagaaaatagtaagaaagtaattaatcactttaaatgaattcatgacttcagggtactaacagaatttggaggtttgattgaaggaccaatcattgttgaggaattacagagacagtgagatatgtcagaagactagatgagagcaaaatattagagaattttgcttggcaccttctgatcaacaatggtaacaaaaatgtgattaagacttaagggaaaaagtcaagtctgcctcaaatcctgtgggtaagcaaataagatctaaatttttgaaaaataaatctgtagtctgataaattaagatgtattaggttggtgcaaaagaatcgtggtttttcccattacttttcatggcaaaaactgcaattacttttgcatcaacctaatatattgtaagccctagagccatcgctaataaaataactaaatagatgtagttaaaaaacaagtgaaggaatggcaaaagaaggcagtaaaggaggaagaggtgaacaaaaaagatatgaaagatacagaaaacgaaaagcaaaatatcagatgtaaatccaaccatatcaataatagcattaaatgtaaatggattaaacagtccaataaaaaatcagagacaggtgcagtggctccgtaatttcagctctttgagaggctgggatggatggatcacttgagcacaggagtttgagaccagcctgggcaacatggcaaaactccatctctacaaaaaatagaaaaattagctggatatagtggcacattcctgtagtcccagatactgaggaggcttaggtggaaggatcacctgagcccatagagattgaagccgcagtgagctgtgaccacaccactgtgctccagactggacaacagagtgagactctgtcaaaaaaaaagaaaagaaaagaaaaaaaaatcagagactgtcgactgaattaaaataaaaataagatccaactctgtgctctctacatacaaccagatgctgttaactatgtgttttgacccagtttaggttcaaagatacagataggttgaaaataaaaagataaaaaaagatatgcacacaaacagcaaccataaaagacctagagatggctacaataatatcagataaaatagacttttacactaaataaagccactacatacaaagagaaacactttgtaatcaaaaaagattagcttataggggagttataacaattataaatatatttgcacctaacaacaaagcccaatgtccataaagcgaaaacagatagaattgaaaaaagaaatattaaattatccaataatagttggaaacttcaataccccgctttcaataatgaagacaataactagatgtaagattgacaaggacatatgctcctcaatttacaagggtgttgcatcctgacaaacccatcataaattgaggagtgtattttatatgtatcatttttgcaccactgtaaagtcaaaaaatcataagtcaaaccatcataagtcagggcacatctgtaaatagaagactcaaacaacactataaaccaaccagacctaatacacatctgcagaacactcccaagaacagcaaaatttcttagtgcacatggaacattctccaggataaaccatatgtcaggccataacacaagcctcaataaatttaaaaggattaaaataatacaaagattttttgacacaatggaattaaaaatctttctacagttgacaaactgaacagcaaatactttggatgataggcaagattcataaatgatatagaaaccatgccatgtgacttgaaagaactgaggctagtgtacccaactaaggagtctaatttggatggtagagatggggatgaagtaggatataatagtttcctctaagaagcctgtcgtttatagcaaggagaatattaatatgtatacatgaccttccagaggacacaagtaagataattgggtggaagttacagcacaaaataaggaagaatattataactgtacttttcagttcagtaagatataggcagtattgtacttccctttttaaaaaaacaaggtctcattatgttgcccaggcctgacacaaactcctgggtttaagggatcctcccacctcagcctcccaagtagttgagagtgactagagtcacatgccactgtgcctggctctactttcatatattgtgttccttaaattggatttttaaagtcctatgtagaaaagccaaacaaggccaggtgtgggggctcactcatataatcccaatactttgattggctgaggcaggaggttagcttgagcccaggggtttgagacccgcctgagcaacatggtgagatcttgtctctaaaaaaatgaaaaccttagccaggcatagtggtgcacacctgtggtcccagctattcagtaggctaaggtggaaggatcacttgagcccagaaggttgaggctgcagtgagcgatattgtcaccactgcactccagcctgggttacagagtgagattctgtcaaaaaaaaaaaaaaaaaaagaatagaaaagaaaagaaaaagaaaagtcaaacagtggtttttaatagctgttcttctagcaaggataagtttaattcctgcaatatgtcttttctcaaaaagtcaaggagaagccttaataactggagcagcttggtgtgcaggcacctctaccgctcccaggactggagctagaacttagatattgaatcaggacatctcatgtctttctcaacaaaataatgctcccttcccccaaacaaatttaccaaactctaaatatattattgcacaacttccttatggtttggaaggaactttttcctaactttatcaaatctaaagaaccatgaagcaactctttctcctaagtctatgcttcagtcataagcactgtgaattacgcaaatagcttagttagatatgtagatgagttaaaaatagaatctgcaaaacaaaatgcagattgtacaaaaattaaggatatgatcaccagtccaggatcacctccaataggttatctcataagctgtgaacattgccacttaaagtgattcactcagggcctaaggaaccttctgtaggagaaattgaggaagtgcttatactctgtatgatttcatatacacatacaaaaaagtggactgaaaaatataaatctattttgccagatgttcttaacatttatatttatctgcattaaaacaatgtttttgttactggagagtggaattttcaataagattttaataagaaaaattatttcatttgctatattctctcagaacataaattacactgtagcagtaagttagactttctttcatactctggaagtacattttagcatattattcttccagtaaactacctgatatctatagagtgctgaagaagttagcagccagattatttggtttacctacaagagattaatttgcatatcagcaaggtctgcataaatctgggtgcagtatctttcagtcttttctctgttttgtaacacttgacccatcaatttagatagtaccttgcctgaagtacaaaaatgaggaagacatgtatattatctcttttaatgataggcaaatgaggaatcaactcttacaggtgtctgggagatttcagactatgtatttataatcttatttaatattatataaccaaatatttttatgcctttccactaattttctaccaaatgcttaaagagagtctatttagaataaaaaccacttgaatggattatttatattaagagcttactaaacattctttgtaatattggctattattttttaccttgaatgtgttgcttaaatttggactttttctcaaacactattggtattttagtggcaaaattatttaatggtagatgtttaacattggagatcttagcatgtattgatttgcacaaaaattctattctttaaaggtcatatgtaccaaatttcataaaggaaatgcattggagatgcttagtagacattttcttaggcactaagtattacttgcttataaggatattttactgtttatgtataggttaaatacttcacttgtaatgtccatcttgtaaagaaagtcctctctgtgttgaaaatctctcattgctaatcttgtttttttatatgtccagtaagagttaccaatatatctttcatgagctatggcaaatcattgataattactgttcaatttattcctccctaggcaaatgggttcctttgtagtacctaggacaagggatccacaggcaggagtcctctggcattgatgactgatggaataagccatagtgacacatagctactataccacatgagagcatcatgatttgtttattttagaactggttgtagcaatattagaggatgaaatgattttcttaaagcactaggagagtggggactacatcatcaggataacttaaagaaaagctgctcaaaaacaaagtgtcccagtctcttcaataaattgtattctctccttgactatttaatttatgcaaatgcacaatgaaaatatttttgcttcatatctgaatcttcataagaaaatgtatatttaaaaataataaaatcatatttttcagttatctacattaaatcttttattcatgttatagtttaattacatgatatctgtcttcaccaatggaaatgtaatgtgctaaatgctccattaattttttccccttataccttatgctcagttatgcctggtacaaacgacatatacttttctgatattattgatgaggtgttcatgacctttctgttgagatttgtgtggtggtgctgtttaaagaaagagtacttagtggaatttgtgtgaccacaccaggcaattgaagaataggtattatttctggccttggttctataacccaagttaattataatcactttaagaagaaaacagtcttgctatagcaagctgttttgggttttctttttctaaatgagagaaaattgatgtgatgctttttacattgcattttacagcaaagcataagatctgtttacctggttgaaattcaaattgttttattatggtgtcaattctttggttttggcagcacttctaaagtgtctattcacaaaaagactcccatagtgaatgaatgctagtgttgacaccacctaacaagcagggattatgtgtttacagaagaagtaatatgataggtcaagtataagaggcacttctcaagagcacttcagcacataatgagtgactgactagaaagtgcggagctgccactctttggcttggagtccgtgttgatgcctgcctctcttctccaaagctctcttgatcatgttcagctgctctgttctcatgtggggaataatagtagagtaaagctgcttttctgtctcatttttcttgctaatttacacattcaagccattttttgtttgctacccttatttgctattcccttttgtccaggcactgttctcttttttgcctcaggcctaagaactaatttgagcttctataattacttcatgttttacacctgtctgcgtatcatgcacccgcttgtctctgtacttaagctgtatatttccttgcagaaaagctagttttcatatacaaggactcctaagtttctcccctcagactgcctacagaagaaacacaattaaactgttgcgatatcctcagccatgcagctgacctttgcagttcatgaaggacaaatgaacgctgtctgctcagacagtttgtgttaagacattgttgagcagagagcctgagctttgttcctcatgaatgaagcaatggttgtagtcattttaaaatcattaagactctgaatgcacagtctcattctacagtgtttgctctacagctgctcttctgctttaatagcagcttattaaatttgggtcaagcgtactctgaagagtatcacaatgaagaaactgttctaaaagttacctgtttaaaaaaaggcaattgattagatttttaacttaagtgacagctgcaattcattgcctattctttgtgatgtcctgcagcccaagcagccttttgtaatttgggcttcattttgcaagagctttcctgaacaatccagggttgctttccactcggagcctgcttcaatccaattaggagtttaacaagggtcaaattaaagagactttacacttcatgtttgcatcattagccataagactgttatgtgagtgcatgactgtgtgtcagggaagagggggaaaggctgcaggatgggacagacacaaagctgtcatccaccgtgtggtgtgctcctttactgatggaggctcagcaggctagcaacaacatttccagttgtcttttggggttgctgccttgtcaaatcagctggtatatagttgtttggaggttacaggtgctagctggggctgataaagaagagtgttttttgcctactcttttctcttctggtagtctgttgtgattggacaaacgactgggaagacatgaagttgaaacctcttgagcattcattatttttgatgagatgacaactatctaggttcatgttctcactcctcgtgctctttcctggctcttcttttttttttttttttgaaaacataattgttggttctgtaaaatattatcataggaaatggaaactaatttttaggagaatagttagaggctttgcaaagaccagttacctgttattcaggaaaacagagttcactatagtattttcagaattgtgttacgtagaatagcattttgctccactttgtccataccatcaagatatatttatatttagccatattatgttactgtttaaagaaaatgacctgtttctaaaaagaagagacaatagaattctgctaatcagcagttccatgcgtgggatatcgctagagaactgttgctgtgccccttgagcaaagctttgtgctgctacacacaaagtaaagatttatctaaaataacactttcattgttcctttcttacctcctcaacccattaataggtactttagtatcatgagagttttcatagtttaatcccctttcaaaagcttttcagaataaaagctctaaatggtcctcagtattaatttgatgtgacttctgtacaatatggtttaaaactctcagaagcacatttttactgcttaccctttttcatcagagcaacgtgtggaaaataccagctaaatgtttagtggagtctctattgtgagccactgttgttgctttctgataacatagattttcaattaaaaaattattgtcattgtgatatatatgactgttaatcctcaagaatatttgggctctccatttttaaaaatgtaaatgtcttcttgttatttttcaaagctgtagttttataaagtctctgatttgcaaagaattgagagtgagtaataaagtcagcctggtaaatagtaatcaggcttgattatatgcactcagttacatctttgtttatatgtagaccacagtagcttcaaacacaagagcttccagcactaataaataacctacctcaccttttttatgtgatgcttttgaatacacatttatctttcttaaaacagttaatatatggtaaatgtaattcttgctgtctgtaaagcatttgatgatggaactatacattccatgccaagttccatttcctcgactcctcctgcaactgcaaagcctccaatatgacgggggcggggaacccctattaatccttttaaattccagatcccctctctgatttttttccacattgtcagaggggatgtatgtatgtgtgtgtgcatacatgtgtatatacacacgtgaacatccttccacagagaaaaaggtatttatttctaaaaatatttttgaagcacctgctagtgctagggactgagccagtgaaacagcagagagagctcaaacaataccaccttgcctgccggggctttagtggagtggagagatggacagaaatcacaggaaacaatgtaaacttacgactgtgaatgtgctcttattggggaatgtgatctggtcagcaagttcagagacagttttcctaagcaagtgaccttaggctaaccttttgaaaacatcatgctataaaaaatttttgtttattttctttccaaagaactgaaaatatttctgcatatgcttcgaactcaacaaatttacaaacataatgaaatttgtgctggtaatatattaggtaaaagaacatgtagaaaagggcatctggaaggagatataaataattataatttctaaggaaagttttaggctcagttttaagttacatttatggacaggaatgagcaagtgacttctaaaactattcctttttcttcattatattttccctgggtttttttttttcttttctttcttccacaaagttttttccatgatttatctgcttaccgtgtggaagcagattggaatcttccactagtgaatgaacagtgtgctgggaccagatcctctgggggtttgtgggtctgtacattcagtgacctcactatggtagcttgaaatctgcttatgacagtaggatctatacaacagaaattggtaaaccctgcaaattctcctcccctccctgcaccagcttgtttagcagcacatccgtgcttatgtctgatacagtacgtgggatttgggcctgcaaatagatttgggaaaaagagtccataacacagcttccctccatagctccaaaggagctataaatggaaactagaaagcttaaaatcaagttttggattttttttattaattaagttttatgagttttaaaatttagccaattatatcatttatcttttaagataatagccacaactcctccccatggattaagtgatgattacttttttaaatgattgtcttttgcatgtaaatgtttactagtttccagtgtaatcacaggcaatataaattcgaaggtatatttttaaactgcacactaatgacctttatcaatcagtctttatttttttccttataatgaattaaatgttgttgtgctttcaaaaccaatgtactcattggttttttctaatataaaagtaatacttgctaaatacttaaatattatagtgtagtcaatatataatagtataaaaaataaaattaaaattactgataatcaaacagcccagagataagaatttaaaatactatacattttcaatgtatctgtctacatataggtagatatataatttttatagatcatagtataaagattattttgtaacccacattattcacacaaaaatataatatgaacatatttctatatcaataagtattgatctacattatttcttttagtagctacataacagttcattgtatgaataccatatattaataataactaatcacctacaggtaaacattttttgatattttctctattttaaatactgtataattttgtaaatactcttttgtatacttgttcatttaccaggatacatttcttaaggtagcattgctggtattgagaattcatggtttgtttcattttgtttttgaggcatctatacaaattgcttccaaatttcccttcagaaattttgtactaatatgtaaaatagcatattggattatttatgttattgctcctttgtcaatataggtattattattcttatttatttttgttaacctgattaactgatcatcacactggttttaaagaatctaattttaaaactatttcttcgtgctctatagcttgtaagcttaaaattgacttcagtatattaaatgttattgtattatttttcaattttgattattccctaagagaaaggaacaaatacatgatttgaagtgtgcaaaatttatgtaaaaatatgagaatacagttttacatgaaagacctgataaaatatatattatgctatctaggaagagaagcaattatgaatattcatttacagttggatatttgagatatttcacattcttcacatccattcatgagtgaatatttgttttagaggaaacattttggattttaaaaccagaatgtggagtatccctttgtagaatgttgccagctaattgaagttacaaacaacaaaacaaccaaaaacactgcaatccaagcaaagcgtatctgaagcaaaatttggcctaaagcctgccagtttacaaactctgcgttttgtggctttcttcctatgtaatataatacacatctaaccagttcttaactaaaactgtttctcttcctttccctgaaaccttagtaacacctacctgtttagattgagcatgcccaacttggaggctgccacagttgagaccgttttgtctcatctcacacccatcccacttcactcttggacttcacttgactttatctgcagttgctgtttttgagtatgtaaagataaaagataaaaatcttttcatttacttatttttctttttttctgatattgttaatatttaagtattttatattgtaggtaggagggaactttttttttcctcttttgatacacggtctcactctgttgctcaagctagagtgcactggcacaattatggctcactgtagccttgacctcctgggatcaatcatagctgggattataggcgtgcccccatgccaggctaattttcttatttttttgtagagacagaggtcttactatgttgtccaggctagtctcgaactcctgggctcaccaaacagtcctccccgcttggcctcccaaagtgctgggattacaggcgtgagccactgtacccagccaatatgtttttcatgtttaaatgcaatgttgcttattttttggtataaaataaaaatgctacgattatcggaacctcatttgtatctcagtaaattactggcttgtattaatttactgcttaaagtaaatattataaaatatatattattttaaagaatgtgggcagaaatcagaattcaaaataacatttttaaaagaggctatgccattagcatacatactgagatatgcatttatttaaaacatacctatacttgtttggaatcatgcttactatgttcatatgaatccaacattgaggtaaaaactggctttttaaaaaaaattagttgacaatagacatatagagtttgagtttagacctataaatagctaactattatttcaatgatacgtatttggcctttgacctttgttgcttaaagactagctcacgatgctccgcagttaatgtaaaacttagttaaaccatggcgacctattccggagtatgagaattggaagtgagaaatggaagtaagaattctgaactgggagtgtaatcagctgtcactgtttaaatagtccagttttattatttctccttcaactcttcattttttcatgtaatgagcgtaaatacggactttttaactgttatattagggatacatctatgcctaagctgaagcctgaagctatattttaaatttgtgattccatcttagaaggaataaccagagtacaattttgaagaaataggttaaaaatgcattcccttaataactacagttttctcctcgaaaaggttaatgtagtaaaataaatactatgagaggtatccatgagttttaatatctggaaatcttttgtgtgtgggacattttaaaagttctttgtgttttaatgaatattcaattaattgattttaaattaattagatttaaagacagaaagcattctactttagtctgcatgttcaacttacagatttgattttactcataaatattttgcatataaaaacaccatttactttcaattaatcttcaattcaaatttaaataactgataggtttgagaaatcaaattcctttaatcacttaacaccagatccatactaattcatcagattctcttatatatttccaacttcatctattaaatttatttatttattttattttttgagacatgttctcactctgtcacctgagctggagtgtggtggcacgatcttagcttactgcagccttaaactcctgggcacaagtgatcctccagcctcagccttcagagtagctgggactacaggcacgtgccagcacactcagctaatatatatatattttatttttgtagagaataggtctggctttgttgcccaggctagtcttgaactcgtggcctcaagtgatcctcgtgccttggcctctcatagaactgagattacaagcgtgagccacctcaaccagacccatccattaaatgtataaatctgatttgttactatttacggcagtagtttaaatacttagaattttttttttaggtttataagtctgccttatgttttttaagtgtttgagaaatcaaatgtattgattcagcaagagtaatttgaaattcttacaaagaactgtgatagcaaaatgctatagttaaaacagcccaggggtcaggtgggttcgtgttctgtccgtccctcactcattcccaacaacacagtcaaaagataaatcctaagtaaattaccccacaaatttttgagttagaatttgtgataaattatttcattgcaatttttcaaaataaataaagcctcaacatgatttgtcacaagtcatagagccagttagaagaactcaacctagggctcgtttgattcctaggtccatgttcttaactccaaaccatttctcaaattatagaaccattgccatagagtttgaaggtattttctaagtcatctggtctaattctacattataggactcctttcttgaacatcccttttaatatccatccattttgaatgtttatagcaataaggacctcctgttaatttttccccttctggctactgtcccccttgtcccccttaaagctatctccaatgacttctttctttctttgtcttaaaaccacttaacataggctttgcttccaacacttctctgaaaatgcttttgttaaggtcaccaatgacctcccttttacaaaatccataggccaatctctattctatttacataatttatcataccctcatcctgaattgaaactgaccttcccttccaggatgccctactcctgttctacctcactcgcttctccttttcagtcttctttgccaaaattctctccttttcttcaaccacctaatgttggagtgtcccaaagctcagttcttggacctttttttttctttttacaattactctcctggtaatcttatggcttaaatatcctccatatactgaaaactccaaaatttctatttctagcctgactctctttcttgaacttcaggctcttatattcaaatgcctacctggcatttctgcttgagagtccaatagataaaccaaacttactttgtctagttttgaactcctattttcttttccactgcccttcccaattcccaaaatattgctgtacctacagtctttcttatcacagttcctttcagctctttcaatccagttgttcgagccaaaaccttggagttaatttgacttctctctttctctcacacccaacatatacagtctcttagcaagtcacattatctctacttcaaaatatatccagaatttaacttgtcaccatctccatggctaccatgtagataagcctcttctgggtattctttaattttgaatgcaccccgtacaatgaaatactcagaaatggcctgattgaacgtgttgcaatggaattgctctatcccttttccatcatcataattcattctaggattgtaaggatcattttagtagtcatgtcatggtgttgactggagtcaaccaaagttccagtatttcttttatattaattgctgctagataggtatcaccatctaaaataattaagtgactatcacttgtggagcacctacatatgcaactttgtttcattattacccttaaagataggaattattatctcaattggtagatgaagaaatagagactcagaaaagctaagtaatttgcttaagatcacagggctagaaattggtagaaacggtagtagaatccagacctgtttcactttaaagccaatccttggaccatcacatatgaagggctgcagatgagaaagaacatgatacactcaaggatttgaaaaacatgcaatatattgggaaagtataagggacagaatgctggcaagaatcagaccagagagggaagtgctcagttttgagggatattataagccatatttgaggagtttacattttactgacaaacattgggaaggtactattaaggtatttcaagcagatttacttttctaattaatgattactctaatgttagcatgaagaatgaattggatgacaacaatgctgagttttaatggcctaaactagagtagtagcagtgaaaaaaacagaaattgatagatcaggtggatttcaggagtaaagtggataacatttgtgaactgactggatgtgggaggtgagagagaggatgactgccaggtttctggctgagtggttgataacattcattcagaatgaccattggaggaaaggaaggtagtgctggaatgggtataggagatgtgataactttacttttggaaatagtaaaaggaatctaggagacatttcagtggtaatacccagatgacatctgatctaggatctaggggagtggaggtctcagctgcaggtaaatctgtgaggtaaatctgtgagacatcagaacatgggtggtaactgaagtcacagaactggatgagttgaatggcggattgtttggagattccatggctaaactggggctccaatatcagagtgtctagcaatcatgccctaatgggaaaggaaggggagctggacatgagtgtctactgtgtgcctttcaatggatatgccttttacctgcagatggcctgatgccttattgtccagccctgaccaggagtccctcccatgggtaactgtttataatggcggatgccattgtgtctcttgtctgacctgtgtctggcgtatgcctgcctgaccgtggctatggttctgcaaacccaaccttgtggttcccccttgcatcctagggaaaagccagctggtagctggctggtagctggttcttctaatgaaaggcacaaattcgatacaccgccacaacaggaaataagttcagaaagctgttacttatagatcctgggcagggaaggcaccatgagtcaggagggaagttctctgtcccaggtcatgtgaggcaggtgtgtagagtcagagagagagagagagagagtgagcgagtgagtgcttgcatggaaactagcagtatatgtaagggaatgggggcaggagagtcactttaagttcgtgggcaaatgtatgaatggtccatttgaaggaaatggcaaaaaagctaagagcccagtctgctaggccagagagaggcctctaagtttttgtatttggccaccggcttaagccatttgtggtgttctacttctagtacctaggcagcaacctttgctgtgttgtttccattacaaagatgccagtcttttaaagataggaaggagttgtttgcaaatggcatttaaagaatagatagagagttagtgggaaaaaattaggagagtggtagtggaagtcaagaaaagcgtttcaagaaggatggactgaccggcgaacagtgccaaatctgaaggggtcagctagatagggactgaaaatagccattgaattgaataaggcgacagtcactatgaaaagggttgtttcagcagattgtcaagggcttaaggatattaagtatttttcatttttcaagctaaaaggggagctcatttcagtttattaaatttcatcttgcagacttcaagctaacttctacttcatgattttgaatgtcaatagatctgatctgaatatgaaattctgaggaagatttttccttatagccactaactgtttattaattattctcaacatacttttgaaaacatttgaaatgggtttgtatcagaggtgactccagaatttctgtgtagaggagattaagactgtgagcgtttgaatggagaattgaaagaacaatccatggaacttgtgtgtttccatggcctatattacaaatcaagaaaaacagtgaggtgttctagagaggtttttattcacaacttaaataagtttaaggaaggacacatgcagcctcatacaaccgctctttcttctgtcattcttgacatagttttgcatttttgtagcatccatgacatgaaaataatattaaataccttagtgtccatttatattttgacttaatttttcagctctgttgttctgacctatctgggtaaaagtaatctgccttgtgttgtaagtgttaacactaagggcctgccatgcaccagccacctcgctgggatgtgtgaggatgatgtttagatagttcttgcaccagattttttaccgtattacacgttactgtctgttttttgactcagaaaaataaaatcaacttgcaaaggaataaaaaagaaggaagaaagggaaagcaaggtgggaaagaaggtaaaagagggaagaaggaagtatttactgagcatctgactaggtaccaaacattatgctagaaactttcatgtatagtatctcatttagtccttacaattttgttaggcactcattttacagtggagaaaactagagtttgagaaagtccagtaagatttattaacttatctaaaagctatgtaggaagtaagaaataaagctgagatcttattaatgtccagaatgcttgccaccacacatcatgccatcttacctggaaaattcattttcctcattttaatattttagtcctattatgacttcttaatggattttcagataacataataataagtagaaaacatgaaaataataaaatatggtggattataagtacatcattcaagtttgctattgaaggaaatgtatgtttcttttaaaataatgtgatccatttaaatatcagcaatcccaagtaaaaactcaaataaatactcaagtaaaagcttgggctattcctgaaaatcattgttagttttgagatatatttattcacatagtcagcctgcaattgtcaagcaatatagcacaggaagcattgttcaagttgctgtggaatacctattttattctctgcttacaatgactggactttaaagaatttttaaccacataaggacttttaaaataatgtatttattggtgattatcaatatataacagtatgttgcatatataacatacaactcagaacacgtaagtactttaaagttgacttaaacctacaatgaaatattaagtacagaacctattacagatttttcgagcaaggaacccatttgacaaagaaagaaaaaataatcactagcataattattactggatttgttatccacacatccagtatctctcaaccctcatcaggtgttgattgcaatgtatatttttactctaaagtattctatgcaagtagatatctctctatatatgcagttagcaaagatagtcaaatatactgctattagtaaggcagcattacactgtatcatattacctatgttaatacactcttcaaagaagttatataatgttttaattttttaacttctacaaatattttttaaattatcccatatcttgttatttgtaatataagaagttaggtattgtgtattgttaatatagcagttacctcatttatttacctgagagtactgtttgcaaataattaggagaatgacaaaaaagtatggttggaaattgtattatctgtcagtacctctactgaaagttgtttttaatgtccagtggagatgttttgatatttataattgactctactttgtttgcttaaagtatgttttgactaagctatgcagtgactatttgaagatagatattctattcaggaatttttaaaacctcaatgtctaaaagaactcatcaaactcacccgtcttgaactgtcagtgaaagcacatgcttttaatttctaacacacattagttgtgtttgcactacaggtacacaacaggaagtaaaatcgtgaacccatagcttcccagtatcaattaaaatcttggctgcatgaaacagtattttttgaggattacctgatggttgaagggttcattcattcctaaatattctgtatcctgggattaaacctgaatagcagaaactgtcaacctggactttcatgttggcccctgttctggttaaaatctttggttgcatggaataggcttcattcaagttacctcaagcaatagatgctataggtatatatggtctggaatttaaaaatggaatagctgagtcagctttagggaccaactgctctgtttgtctttcataaaccatttggtctgctaatctctgagcgttcttttcttcttctcaacagataatcttcctgtgcttactcaaacagctttggttccttgtactttcagcttgcctgagtcttatcttggctccctggcctctcagtacattgtgatatttcagcttcagttcctactgccacacagttctttctgcatttcctttttctagctctctacagaaagaatctgactcattctactcctattttttagtcaggccaaaccacggactattggcaaacctctggattagctgtcgttgattcagcctagaggaggtaccttgcggtcctcataggtcgacctccttccacaaaaactgtggctgagcccatttctctcagaaggcagctgcaggctgtcttgtactacctcatggtaggattgatttttctaagttgtgctttgggaaatattgtaagccttgaaactcagtgtaaggttattgttgaagacattattgattatactatacaggtttttttaaaactcttggcataaatttatttctagctttagtattaggaaataattgtgcaattattcctgaactcgtttgtttttatcttcattacctttgtggtgaaattattacttttttcttttttttttttttaagatggagtcttgctctgtcacccaggctggaatgcagtggcgcaacctcggctcgctgcaacctccacctcccaggttcaagcgattctcctgcctcagcctcccgagtagctggaattacaggcgcctgccaccacacctggcaattttttttttttttttttttttttttttagtagagatggggtttcaccatgttggccaggctggttttgaactcctggcctcaagggatccacctgcctcagcctctcaaagtgctaggattacaggcatgagccaccgtgcctggcctattacttctttttcaacattgcctgttgggagttcacaaatttgtgccccaaacacaggaagtttaaatgattctgtggtatgcttttttagtcttattatccaacttacacctgaattcattttctgtttttcacctttttttaaatatatttctaatttgaattataatttatatattcctgtaagtcactttatatcttttcagaagtgaggtatagatgtaaagtatataaattataacacattcaggaacatgttcatgtttccagctagtttttagttaaatgtgagcaaattttaaagaaatggacaaagtattggaaaataatagtatgtgacatttttctgtatttaagtaattttaaatcatccagctacttttttaaaaaaacctaaaattcccattgggtttagaactatctttcaaatataatttgagattagaaaatctattttattacacattaatcattttttgtcataactatttgtaacatattctttgtcatggagaaggtagtagaagtgtaataaaattaatatacattttaaattatttctacataaacccgtttctaaaacagcagcctctagccctccaacaataacatactcctaaaattatttttccccagactctacttcttggctactcctttagaaaaaaaaaaaagaaactgacatcaattttatataaaagaagcccttgaggtggaaagttgggaagactgcatgagtttatagcggacaaaatgtcgcttacattttgctgctcagtagtttgatatactcatttgctgatgtgaaatgacgagggcttacaaaacagggttttgttttttagctgcctgtagacctagtggggcctaacagaacccagtcagcaggtcattaactctggagaaaacagcttgcattaatatgctctaatccggtataattagtcaaattactgcacgccgaccagcttgtcatgtgttgtcagacttggcatgtacgctgggttgcctgggtccctctggaatgccaccctcaatcagaaaaaactgctcatttgtagtgggtcttgaactcttgatgcaaaagcctactaaaatagtggtcatagaggaatttttattaatttttgagaaaaaaatattttcatcaaaaataatttagtactttggtgattgaaatggaatctgttcatttttgctgttttctgtaccatatctatgtaatactccaagaaaaattaacattagtgcaaacaaaaaagaggtcgaaaataaataattaccggttgatcatttatcattccaatatatggcagtgtgcatttgtaggtgtttgtgtatgtgtgggtctttttccagtagggtaagaggttattaaactctaaaagggctacattagcataaatttacaagagctcttgttctggcggcatgacaaaaacctgtgttacctttgcattaacactgaattgcttgttgtgcttttggcaatgacagataagtccgtgtaattccccattgcaacagaaatgatgctccagattccaaacgcatcctgaagatgtcactgacaataatcttcaaagaacgggcagtgaaagtgggctgtatgtttgtaggatgatatactgcaaatgacaggaagaattatgtgagtgaagacgaatctgtaacatattattaagcaatttcacgagaataacagggataaaaggataatggatgagggtgtcattattaccttcatgtagagggaaagcaaaagcaaaggtagagagacaagattaattgaggaagggtgaagcattcattgctcatcagctcttttgtactctttgctcctgaaattccagactgaggaggggaaaaggtgctcagagctgcattttaatgcatctggcaaagagtaggatactgacaaggcactttttagccacctccctttttatcaaaatacacataatgactgttaccttttgaatgttccaaaatcacagcaaaaattcagcagaaggttttattctttgtgtatatatgtatgtgtgtttggcagctttgattattaattaagcttttaaaacccaaaattataaaataccaaaatggttttttccatgcattgccaaaaaattgctattttcaatttagagaatcacgttctgtgatgaaacatttcaaaatccattatattattattttgattagtctgaggacattgtgttaaaaaggcaatatattttataagcagtttttactctccattttctaagtacatttccctttcatgtagtaactggttttttttttttaaatttaaatatattttctctttgttaaatgaagggtgtgagtaattaaaagcttaaaatactaaattctccatttatatcttttttaattacctgtttcttataacttctcattgggccaattactccaaagcacatattatatcacacacaataagatgcaattataacatagcaaccactatccttctggttgcagaatggtggtaacacaggtgttttgctgtaatctaagaaaccttttggggcatgaaatcccttctgattataatttactcatgatacggagttaaccttaaacattgtagaaactttaaattatatatatgtttctgtgtgctggactagtagaaaaataaaatgatcatattacaagcttaaatatgtatccaatggagatactcactcaaagattaatttgggaacaagaagcctacatttcatccttgtctacatagcaagttcctatattcaggaaaggtaacaaaggattaagattcaggagtcagtcagaattgagacccatgcaaggctgatagccagataataatcaagagtgtaatgtgtatcatacacagacatgcatagcagtaatgctattaaatgctacacgtatataccatctagtaatgctatattttattgcatactgtctctctgtatgcctataatgttttatccttgtcattttctgattagcagaactagaatttccattttagttctataaatgggaaatttgaggagcagaaaattaaatgagtctacccaggtaattttatagtaaatgatgcttctaagaataaaaccatcttcagatacctcatccaatctacattccatttgctgtttgattttttaatttgttattcatgccacattctgttttttgatattttgctagttttgatatgtgtcttttaaattatcttaaatgtttcttcactaaaggagcatcctctgccttatcttttctgtagagtaagggaaaagaaactaacatttcccaagtacttaatatgtgtcagacactgttctaggcactttgtatatattatctaacttaacatagttataatagctaagtgagttagatatcattatcactgttttacaaaggacaagcaaattcagagatgtccagttatttctccaagctcacaactgggaagtgttagggattcaaatctaaattttcctggttccaaagatcatgttctttcaattactacatactcacttactcttgtctatcctatatcttaacatatacagtcaaaattatactgtctttttacatctatcccatgttttagatctccaaatgtctgtattcagtggcctttttctgcccacatattccttgatttctgcataacatttgacactgagcttccgaaatcctaaacatgcttccttgccaagtcctccgctccccttccctggccactcttccgtcggcctcgccctcaatattctcccatccccaaaggtatgtcctttcagtcacctccattctctgccatagagatctaattccttttcgtgctttaaactttcactgtgtacagataatcccaaaggtacttctctagtcttgtcttccttctacagctctatattcttagctgcctgctctgttgattagctcttagtatgctttgattatctcaaccaagctcataattttccttttttctaatttccttttaacttcccaattttaaaagatgtcgtgattctaatcacccaggccttattgcccatttgaattacttagaaattctttagctcagcatcagaagcctctcccacctctttagcctattggagtttatctcccatctccatctttggcagatcaaccatccttcaaggcccattatcagatatcatctttagtaagaggctcgccccaaaccaatcaaacgtgtgtatttctcacatctttgaatctccaatcaatttgtaccttctactatatattttattgtagtttgtcttttattatttctatagttgtctactcacttccttagacagtaaacatcttgaaggcaggaaccattgtatcttatacacatagtacttggaataaccttacaagatacttaataaatatttgttgaattgagttaaataaaattatctgacagtctcaatcaagtatttttaaaatattttttcttttacatgaaaaagcctttactatgttgaaatttaatattaaccttttgattatttgacactcttgaatgtattttctttcctaatttacatttatacattgcaatttattatcataatagttaccatttaatgagcatgtacttcccttggtactttgttaattccggatatatggaggtgagcaagtccctaccttcatgaaggtcactatttccttgagaagatactgctcttttcatatgacatttcataccaacagtcctttgtagttatatgtatgatatatggaaaaaattaaaaagagaaattagagcactttattatatatttagatatatcttaatcttaattatattaaatccttataacaactataaaatgtaggtactatttatccccatttaacaaatatggaagcagactctgagagtcaaaggtactttttccaaatcacaaaagcagtaaaatggcagagccggaaatggaattaaagatggtttaaagccaaagtctgtggttttccactgtgccacatggctctgcatatccttgtcttagcaaagagatgttacatgacaggagctcttaactgtaactcctgtatttgcctcaaactagaggaggcagggaacattagtcataattatgccagacgatggttagaatggtattacttgttaaacttagggaaagcataccccctgcagttttataaaaggaaggaaaatatctttctacttttgtgcaaaatgcccaatcaggttgagcacacatggttgccctacttgctagcagcagtcacaagatcccaattattgatataatttgggtcagagagaatgttttctgcatcctaccgagctttgatttggggcggtgtggggggaaggttgcaggatacctcatagaggctgacactttccactgcatgtgctgctgtgcagatgattataagagagcaattcttcattcaccataagtccaaatcaaacgtagaacatgacaaatagaattagttcctctcttccctttgcattaagcaaatttgatgcttcgttgtgaaaggaaaaagcaagcaaacatcaacagattgactaatacaattctacttagcctttcaagcaatctctcagactgcctcttatgcctacgtgtctctttatttattcttttcttcttgttttttaactccaaacttcctttatcaagacttcttttgtcttcctttcctgtaagctgtttttaaatgtattctttgttttggggaaaagtaaaaattttctgttggtttcacattacccaaatttcaaaattctagtccacatactcatacaaaaaaatgatactcctaagttttagataagttaggatttctttattcaatttcttgcatctattagatgattctaattttatgtttcaacttataaacttttaaaggtgggatcatacaagtccctttcattgaccttattactacccatcatggtgacatacccaaatgttcatatactagtgcttttgattataaagattttctttttattttcagattttctaggcattcatgaaatattagtttcatttattttttaacatagttttggccttgtaaatagcattcagtgtaatgtagacatgaatatttcttacagaagaaatgaagagtataattcatttattttttttaaattttaaagggatacataataattatgcctatttatggggtacatgtgatattttgatacatgtatacaatgtgtaatgatcaaatctgaataactgggatattacctgaagcatttatcatttcttgtattgggaacattttgaatattctacctattttgaaatatacaatacattgttattaactatagttactctgctgtgctattgaacactagaacttattccttctatctaactgtatgtttgtacccattaaccaaactctctttatccccacacctccttcccatcctctggtaactattactctactttcttcttctttacagcagtccccaacctttttggcaccagggatgggtttcatggaagatcattcttccatggacccagggcatgggtggggatggtttcaggatgaaactgttccacctcagctcatcaagtattagattttcataaagagcatccaacctagatccctcacatgcgcagttcacaacagggtttgcgcctgctggcccatggctcacctcctgctgtaaagcccagtaccagcccatggcctggaggttggggactcttgctctataagatcaactgttgtatatttgtctttctgtgactggatttgaagagcataatttaacctggtgatttgattaggtagaagccaagcctaaggtgcctactatcctagtatcactatagtcaccatgtataataatacttcagttaaaaaatgccttgagataaggcaaccatgtctcttcctataccagcgagattctaacatttcctctcattagcactgagaaagtttttataggataagggactggagagaggttgagaaggaagatgtgccagtgctgatgctagcgaggaaaaggttagagtatccagggttacaggagcatggtgccaaggacgtcatgccacagaaactctgagggacaccaaccaagtgaccagtgatctctctctcttttttccaactagcttcaggaattgattcccctatttctctcttccagtactattatagattactttcacccagggtttcttttccttttgacctcaaagaggaaaagaacacagtcttctggcgtctcacaactgtcctctccctttagccctcagactcctttaaacttctattggaaaattctaagtctttatatcacttcattttgagagcttcttcttgaaacttatgtatgacatactataaatgaaacttttttcggacatatctttactgatgaggaaaatttttcattgaggaaaaaatcttttattccctcacatgccttctttgtccatagagaagaaaattccactcaagcttttgttgttcttcccatgggaaggaaatttctgctctcattttccagagcattttcattgctgggtgttggaggccttgttttggtttcaaatcacactgaattgatcaagtcttcccaggataaccttgcaataagggaggataatattagatattaattttattaatatttatgaataattactatttaatattatagtcattactattaatttttatgaaaagttcctagttttacatctggttattgttcccctgatgtacatttccttagtcaaaaaccctgcaggaaaaggcaaaatgcgataggctttaagcagcaaaatttcacccacaggttctaattctgattccattattattacaagtatgaatattcaggaatcatttggttgcaagaaatagaactcaaactagcttaatgtaaaagatcatttattttaagcaataggagtagctcatgaaatcccatgacaagaacaggcagaacctgaggagagactggaactgaggattggaaagccatttgtctggatgtctccccttctgggccacgtggttctttgtctctgcttctgcttcatcgttgtttctcctcacagataagatgtccctggatctccccgctagaaacccaaaagtcactgcagggacattacagagactgcaattcactgctgctccattaccaactaaagttccactttcaaattccaaggagagggaatttggttggtttgcctcggcaacaaatgttcaccctggtctaaatcagctctggtcagaaagaagtagggacacacctctgagagtatgggaaagcttttttgagaaagggggcatggttggtacatacattccaaaaagtctctcccctttaactattttggttcctcctttcctcagtatactattcagaaagaagaatgcgcaacccagtttggagaaagataggaagattcttaaatatgaacccatcaacagggagtcagacagagaggagcaggacattccatacagatagaaggaacagtgagtgcaaaagtacagagaggcgaaccacttctgagaacagcagggattcaaggggatgtagagcagtggtatgaggggaacccagagatggatgctgatactcagcagcagcatttgctataggatgctgggggtggttggctgggcacggtggctcatgcctgtaatcccagcagtttgggaggccaaagagggtggatcacctgaggatcacctgaggtcaggagatcgagaccagcctggccaatatgatgaaaccctgtctctactaaaaatacaaaaattagccaggtatggtggcgcatgcctgtaatcccagctacttgggcagctgaggcaggagaatcacttgaacccgggaggcagaggttggagtgagccaagatcacaccactgcactccacactccagcctgggcaacaaagcaagataccatctccaaaaaaaaaaaaaaaaaaaaaaaaaaaaaaatggatgctggggatgggagtcagagtctggaggcaggggcattggtaagggttgccggaggttagaaaaccactaagatggggtccccaccctcccctgcgacggtaccagtctatggccttttaggaaccagggcacccagcaggaggtgagcagcaggcaaggaagcactgctgcctgagctccacctcctgtcagatcagcggcagcatgagattctcataggatcgtgaaccctattgtgaactgtgcattggagggatctagggtgcacactccctatgagaatctaatgcctgatgatccgaggtggaacagtttaatccccagaccaccccaccccctcaccccctggtccgtgaaagattgtcttccgtggaacgggttcctggtgccagaaaggttgaggactgctgctaagagacttacacagctttatcagtgaaaataaaaagaacagatgtgagaaatactgtggagctggaatcaacaggattagccaccagttggacgtagaaaggaaatgacaagaatatttacagatgagtcccaaatgtttagtttgatggctttatgaatagtgttgccatccactaagataatgacaaaaacttactattattatagtgaccaccctttctgagtacccattatatacaaaatactgtgccagaaacctttccatccactatttaatcactctattgtccccatgattgatattattttcactgttttatatataagaaatgaaagtcttcaagaatttaggtatgttgcctacattcatgtaactcaaggtacagagttaattctcatgcccatttctgacatcagaaccaccgtgcacttgggtttgtttttcttaagaaagaagaacagattttaaggaaaatagaagttcagtttggacttactacattgtgtttcctgtgagacattcagctggagaggtctagtggacatttgactatgggtctgcaacttatgagcagtctgggctggacccttcgatttgagagacagcagcttaaagtgggaattatgagagtggcagaaatcactcaggaggaggaagctgcccaatgagttactatgtaaagcatacgcctgcctctcctgggggttgtttgacatcataaatacactgacatacaatttttcaaggcattcactttcaattttaggaatcccttctatatcagttattatagccctgctttttagatttgtactttttctctctcttttcaaaaatatttgccagggatttgtcttttctgagaaccagtttttagacttcttaaattttcacttttaaattttctaatgatttttctatttattttagctatatttccctctgcttttttcctttgattttttttctgcttttttaagatttaaattgaattccaaattcatgaagttttctttatagttgtaagcatttaaaagtaaaaacttacattggctttctattttcatcacatttcatggtaatgttttaaatattcaccatttcctaaatgctctattactgtgttcatgcctaagacaatgacattaacccaaatgaatctaattggtaggatatctttggtaataaggtctttcttggggcactggaaagaggataatgtaaagcctcacattgctccctctagattctataccacatgttacccactcaactcagaatccataaggaagagctgtgctacagactcaaagaaaaagaaaaagattcatcctctcttttcgagtatgtttcaaaacaccaagtcaaatcttttggttaagttccaaaggaaaaagtcagcaatgaacattgtgatctgagtgaggataggagctcggggagtgcctccaagcccttgtactgcctttcccatctgtttttcactttctcccattcccccaagtacttagtagagttttccattaagctccactgaactgagccattctcagcaaaataactccacaggttatttattgcggttcaaataagttccaaatcaaattctgtgtcattgaatatcatttttaaattccttcaagtcagattggtatattacattgagtttgtcatatttaaccaacaaactaaagctaaacattttccaaaggaaaaaaacaaatgctgaaatacaccacttggattttatttaatattatttaaaataacattaaactagaacatgtggacataaattctataactaaacttactgatttatgtatcatagaaaagtaataaaacaactctcttctaaataaaggcttatttacacaatgttaaatggtcagaaatacagcacttaccaggatgttccttgtcagcacacaaggtattgcaagaatagattacctggatgaatgattcagaagccttttatctagagagtcaatataataaagataggacatagtgtattctggtccccattgtggatcctttttttaatttagagaactaaattgatgtcatttacttagaagaatgctcaataacaaaatgtattactttatccttttaaatgtcctaccatttttcagagaatatttaaagcaaactaatgcatatcagaaataagttatcttgttactgtcaaaggatattaaatgtagttgcttaatatatttacttaccttgctttagtgcctggtatatcaaaccattgaatgtcaatcaagatatgcattaaatcattatagagattagtggtaaatattactatattattaaaataaatttgaggccaggtgcggtggctcacgcctgtaatcctagcactttgggaggccgaggtgggtggaccacctgaggtcaggagtttgagaccagcctggccaacatggcaaaaccccatctccactaaaaatacaaaaaattagccagtcgtggtggcgcatgcctgtaatctcagctactcaggaggctgaggaaggagaatcacttgaacccagaaggcagaggttgcaggaagccaagatcgcgccactgcactccagcctgcatgacaggagcaagattccatctcaataaataaataaataaataaataacaaataaaaaacaaaaaaacttgagaaaacattcccatatttagagggaagtgtactctatatgggaactctgaggcaggatacttggtatcttagtcttttggggtcactataacaaaataccttagatcaagttatttatagacaacagaattttattgcttatagttgtggaggctgggaagtctaagaacaaggcaccagcacttttggtgtctggtggaggctctctgccttatacatggtgccttgttgctgtgtcttcacatggtggaaggggaagagggtttcccaagcctcttctataagggtactaattccttcccaaaggccccacctcttagggattacagattaggttttagcatatgaatttcagagggaagggagagacacgaacgttcggaccatagcacttggattccagtctcagctctcccagcatttagactttttgtgaccttgatgaaataagttaacagttctaagtctttccttcctcgttggtaaaatggggatacaaattcttgtccagcctatcaaaaagtgattttgtgatgcttaaagttgaatatttgaaaaatgtgtggtatgtatatagttatatattaagaacttctacattttgttttgtagatattttaaattattttgctatgaaacggtccaatcagtagaaaaaccaaccaatgtcatgtactcaactgcccaactttaacatttcataaaatttgatatatttgcttctgatcgtttttacaaaataaaacattaaaaaaatacaagtttttggccagtggcccatgattgtaatctcagcactttaggaggtcgaggcccgtggatcacttgaatccaggagctcaagaccagcttgggcaacatggtgaaaacccgtctctactaaaaatataaaaattttggtgatgcacgcctctggtcccagctactcaggaggctgaggcaggagaatcacttgaacccagtgtccttggagtgtcacttttccagctggaaacctctgtggcctatggtgccttttcccaagttttgcttgggcccactgggcttgttctgcccactcagcctggcaggctatgctaagcttgcactactggcccagatcccatgcctgccaagggcgagccaggcacagagtggtgaagaatgtgtgagcgagtgcatggtccggccaccgtgcacagccaggtgtgctggctgtggcagggcaggcagctccaggcactggcacaggtgctggctctgtatgagactaaggctggaacaggcatactgcaagtggcttcaatgatgggcaccgggaaatgcagtggcgacaagaagctggtagacaccaggaaccacagagccccaaagagagtatcacaaccatggctcagggagcccctaggtctgggctccctgaagggccccagctcttctcttcctctctccttctctcttctctccttcttatctcccacaacatggcaagcaggggccatgtttcagccctgtttgtgttaacagctctttcggtcatccagactaatgtccagcccttagcagagaggagacccataagaagtgtggctgagtcaggttattttatgggctcagacgggaggaagtacatggtgattggtccatgggtgaacgtgggcatgcctggaaaatgcaccatctgatcggccgaacggtcatcaatgaagtcttccctctgggttgtggatttcacccggaagtggcagtcaagcctcccggcttcaggccattcctggcttgaaggtggggtttcaccagggactctcccctttctgcccaggaacccgtctgcctcctgccatcagcatgccatccacagcacccaagctgtttatgctgagaggtgcctgcaggtgcatgtcgggttgccttcagctacccccagcctccctcctgagctcctgggtgcccaaagtccagacggggccccaaggcggcggagggctggcatgtcattgccaccccaagtacacacacacacccggctgggtcacagcagtgcccaggctcagccacagccttgtactgtaccagaacgtgctgggagccaggagaggccagggaatgggaacaggcacttctgagcctgcgggagctagggcttccagggcccctgagaacatagggatgcccaggtccagagccacagctgggcggctgtagctcagtaggaggcggggctcccacctgttcctggctcctgctgcattgccgaacacacaacttcatccgcaccttccgcgcatcagccggaggcttcccagcagctgttctagtcaggctgcctctgccatcactgggaggtgaaagttgcagtgagctgagatcatgccattgctctccagcctgggtgacaaagcaagaccctgtctcaaaaaataaaaaaaatataagttttaccccacaatggttccattttgttccctctttccctagaaactccacattattatatggatgcattatcctaatatgatcatgttcaatttaggcttcctactcaattttcagtttttcatatatgcaacaattttaccccaagcataagtacatccattatgatgacatttaatagaagggccaggccactcacatagattttcagaaacactgaatttagtcatcatcaagaaaatctgtaatcaaactctgtttgtctttttttgttctctttctgtgtgttgatgccaaacagaaataaagaagacattcgtttaagtgcatttacactgtaagaaagattgctcattgaaaatattgatttttaattatatctttgagataggtaaattaagaaccagaagcaattccacaacttgataaaaactacaattgtaggcaaatttggatgacaaatatgaatatttactgtattgggaataaggttaatattttaaaacaaggttgacaggagaaaaattgtcttagtttgcaaaaggaaatttgtttctttaagtgaaaattggggtcagtaggccacagctcttcttgcttttacatgcctgaaatgaattaaataatgcagtagcaaagcagtactgagcagactaatgacaaaattatacattaaggctcaaaatcattatacactagaaatacatattttatataagaaaacatgaaattttaaatgcattcccacttcacctccattatcttaagagagaaaaactaagtcatatcttcttatgttcattaaggaactcatggtctttttctagggagcaagggtggttactggattctgtttgctgattgtgatttcaatgtgattaaagacttattcttcatacagtagatgcagtatccagccccatatgctattcaaagtgagtatggtattattttatagagggtaaatctaattttgagttgtttacccttctttggattcctttatgtgaaataatgatagtaaataactttgttaaacatgtacttactatgttctaggaattgtgctaggtaccctacacccactctctgattcacaataccctttgaggcagacatgattttcaccattttatagatgaggacacaggctcagacaggttaaataagttgaccaaagtaaccaggctagtaagtggcagttattagatgctaacttcatattttcagtagtgacattttcaggaatgtattgcaaatatattaatattcaatccactatcaaatttcatgatttatgacttttaaagtaagtgtgagtgggagtctatttttagaaatcaaaatgaatagcactttaagtacactatgcacttgtgtacacttatacacatggagcattgtgtttggctcttttggtttcagtgccaatgccagtagttaccctatggaaaatgttagtgaaaaacactaaagtgtagtagaaagtacattttattatataagtaccgttttatatgtgggcatatagtaaacaatcaacctatgcatattacatataactttactttgaaagacatgtaaatagaacagagtcatactgtgacatatctatatgatgctcaaataaccatctgattcagagaagttatttcattagaatgtggtttttattacaacctttcactctttagtccctcgtgtcaagttgtatagacagggcccaagctgtcatgtcctcagtgggttgtatttatttataatggtacatttttcccagcatcacaaaaggcagaaaatttgttattgccatgtgaaaatactcattttgtaccattattctctttacacatatttgtcctcagaatatgggaaataaaattagcactactgctacccggtaatctttacaagaggattgtttttgaagataaggaattcaaatatcaataagctgaactgaaaacaatattaaatttccaatgtgatgtggcttctgtttggatagagatggagctggtctatgtttctttactctgtgttcatagtatcaaagtaagctttgtatctgtttttctgtaatgatgacatttacacttggttgcattaatatgaagtaacatggattgcgtgtgttagtaggttctttttaattactgtgtaaaaataatatgtaattgaaacaaaaagcattgtttccaatcctaattttttttcctcaagtccatcctgtcaagctgcaagcgtgaaagttattttctggtggtgtgattagattggggctgaaccctccagctggcaggcctgtctgtgactggcggcggcctgtccccagtgcttgtcatttcctgacatgcctgacaggatggggacagccgccccagacaggttcattagatggtgttttctacagctgggctaaaaataaataaataaataaaaagtctgtgctttgtaaaagcccaagctgtaggggcccttcttgttggtttaaaccagggccttgttttgacaaattttgatctgtgcagtttttagattttctgacacatttttgtttccttcccctttggcctgcactttgtgctctctgccttgttgctgcttcaaaatcctaacatagtcttcccaagagaaaaagaaccaccgttattgagggcttaaaagaaacaatagtgtaatacttcataaaatagcaatacttaatctatttccatggtgatctgcacaatggaggaaaaacaatcttgggacttgtgataagccaattacaagaaaggttaagagtttttttagtgccagaaacatgccatctacatgaaaacataggatcattactaacagtctacactgtcaaatacactgctctttagaactgccagaaatttaagctgtcttcatttttgagcttttaggaagctgacagagttttctgcctgtgttcataggcttcgacgtcagaaagagaaattacggaagactgtagaatacttgctaattaaaaccagaaataaattcaaaaatcagatttagaaatatgcttctttgtcaatgatagggcccctttaagactaacgatttgccaaaaatggagtgcatttgaaacatacatttctacagagtcatgatttatcattctcaaccccaaattcaaacttttagaactgcagaattggaaagaaaaaaaaaaatcttcagccaagaaattattattctgggttgcacctgtaattaaaaagtagctattgacatctgtgccttagagacttgccgtagtcttcctactatcatagttgctgatagctgctttccattaagagaaacattttatcttaatttttagtagatagaacatgcccaaatagaacatatctgaccatatttgtctaaataatcttagtgttgctgttagctatatttcctttcacatgtaaagatacaaaatataataatgtttgtatctcatatgctttgtcattggtgtaataagtagtgttgctgaaaaaaaatcaaattcctcattcacagaaatcctagcccttacctttcctttgtattgttagctttcactgctttagttccccgtctctatgacaactgtttaaattgggatgggcaactgtcatctggagtattactgagagaaaagtgttagtgagcacacagttcccatagatagagcatttcaatataatccaattttaattgagctccagagactttgatgtgctgcagaaggttgggagagagctattccagggagaaattaaagcagcccagcaaggcttccctactccagactgtcaccattttaagtaagcattagcatcagacttaacctgcccctatggaacatctcacttcttttttcagcttttcactgatttattttgccatatgtaaaagcaaagcactttcatctttttatatatgtttttacacccatttgattaggcttgaaaagcttgtactggacctgagattcatcttatgctgtctgttggactttgctttggcggctcataaaagacatagaaagtagagtagggattagcttcaaattgtcagctattatatattaaactttcttttttaatgctgctttgtaagaccctattttggagctaaaaagttgaaggaagtgtaatttgtatttagcttcgatttgtcattgaatttcattttaatgcttagattcatggtcatttattagtggctacgatttttatttcaaaatgcattaaaatatcttttcctcatcacatgaaaagtacctttcagggaaagctggttcagagcagctgaatacagatacatcaatccttaatagagaaaccattaaccctttattttttttaatggagagaaaaaggggtatttttccatatatattcaaagagccttttaaatattttgaaatataatgttgaacatgcattaaatatgctagtaataataaaaatgacatcaaatcacaatgttaattataattaaataagtactaaatactttgattgtgcagtcaaaaagctttgttacaggtatgataaacttaaggaaattatctatttgtgacatacttgacatttctgatctatattggcaccttaaagaaaaacacgtatttagaagttaagtaaaatatgacaataattagaaattagtttgagtctatgcatcattctagatacttctagtaccagaagtagattgactgtaaagctaatgaatcttcagccagggccccttactcttcaggccttggggatgatgggagttgctgataatggtacagtggtttcagtttactaagttgcattaaaagatctcagaagaatagaacctaatttctaaggcactagtaatttgttgagttttttttttctaattctaaatattcatgtgcatagcttattataaacaatgttgcagtgagtgatctggtacatatttcatcttgcttttctaggagtatattcacagcataaattcatagaaataaaatcaccaagtcaaagggtatatacaaatacaattttgatagatgctgccaaaattttcttgatatgttttattatttgtgcgcccactagcaatgtagtgagaacttgtttttctcacagtaagctcagtattagcaaacttttggatttttaccaatctgatagattaaaaatatagcattttcatataatgttctttctccaacaatgaatcaatttaatcatgttttcagtcaaggaaagccatttttactattttctgtgatttatctatttgagcttttttaaaaggaaaatgtcaccctctcaatgtctgtgggaggggattattgataaatagtatggtttgtctcatgcatgttatttttccatattagttaacataaaaatttataatacgtataatgaaaattatatgcacatataggtatgtccctttctccctgctcccaacctaagttaatttctcattcctcaatggaatttcctcctaaatattagtgtcatttgttctgaggataagaattttttttaatttacctgcatacccaagaagaatttttctgctctagcatagatcaactgccctattacctcaaattctagcttattacttataatacagttagctaaatatattaacactctgtttgctacataaaattctaaaccagaagggctgcatcctttataaattagttagccaatgtggatgtctctagtatatatttttatttatttactaaacatgcatattggagaagcatacactggcactccaggcagctgcattcattgagtacttgctgtgtgccacacactatactgagcaccagggaaaacattccacattaaggtggggttttgactgaaacacagaaataacctctatatatggagaaaataatattaggtttatttatgttatcagtggagagcaaagttttaataacactagatattttaatttatattttattcactggttatcattcctttaaagttgtcaggtgtagataggttaattgtttttattggtaacacattttctttgtggaagttcatgtttatgtgagtgataacaaacagagtgattgccgtatctaaagtctggactgaacttcttttctttttcataatactcgtaaatctgccagtaatcctaaacctaggaaatggcagaaaactcctagccactggagccagaaacccttgagactcctttcatacctttacctcagcacaaaacaaaacactctagccctatctgtctcagaactgtctgttcttccttccctcttcctacctgctgcaactctcttaagtcagacttcctctacttcctactggcttcattcagatttctagtttagcctcattccaagtcattctccatactgcttccagagtgctctttgcaaatgcagttttaatcttataaccaccttcctccagtgctctcaatggcatcacattcctcattagagctgccatctattgagggctaagttaaaatccccattccagttcatcctttctgcagtgagtgctctggacagcctcttgcctgtagacatgtgacctctgtacttggagtggaaacacctgagataagaactttacataccgtagctcatttaattctttcaacaacccagtaaaatagaatcatcctatcaatcttacagataaagacacaaatagaaaagctgggctccatgaaaggaggggccgtctctgtcttgttcacaatgtgtcccatcacctagcacaatatctggatcctagtacatgccgactgaattttttttgatgaacaaattatgtgttatgccaacaggctttgcctaggatcagagaacttgctcatgatattcaaatgaaacaaataaaaggcaaattttcagcaaactagtattttgcttcaaatagctttacaaaaaaagaataaaaactcagcagaagagaaaaaaataatcctggggcattccagaaatgcagaagaaactttttggttatatttaaccctggaaatactgttttcgttgcctgcaagtcgggtaatctctaaatcctctttttacccaattatagatatttgtgaaaggtactcatttgccagcaagggccatttactgggctatttacagttaaactgagttgcatttcttgaagagctaattttcctgtaatgtagaaaactggcggcagaagcaaaaacaccatgggaaattcagtaggtgcattgtgtagttgaagcatgaaggtgctttaaggtgttttttgtttagttttgttttgttttgttttttatgttaaacttcaaatgcagaagacagaacacgcaaaaccgtttagtaagtggtaaataagaacaaattccaggaaataatcagagctgattggagcaatgtgacacacagaaccagagactggatcagagaataaagtacactgaaaaggatctgggctggggtcaaggcagagactgctcccatcactcctgactgagggttcactaaggtctgggtaggggaggatcgtgaattcatttgttcaacacatctatgtagcacagcctttctgctaacctccccacttgatacttgctgtgttatttcatttaatactcacagcaaccctgcaaagtagatgtaatttgtcccattttatataagggaaactgtcacaagtgtattgggaaacttgcctgaagttatacaaactttagagtctgtgtgtcatcctccaagtccaagttctttccactacagcatggcatacagatatataaaaaattactttagtctacaaaactaagtgctagtaaagtacatacttattgctacatactggtaggatgagggaatgtggcaagggtaacattcatactgccttaggtagatacacagtaaaatagacccaatcaaaaggacttccaaaatgcaagtttgcctgcatgaggttatgtttcattctaccacttctcttcaggagacggtgatgctgagggagctgtagctttaagagaaagaaaaataaattctcatgaaccccaagcatgcacctgtgaatacccaggggcacttgggttttcaagtgaaaatatgcttcacaaactcggaacccatattttatgatagctttcagttgctaattgtcactgaaaaagaaaagtctttaaaacctgaaaaataattcacattcatcttttctttctggtccctgatgagcctactacctacctggcagatacttgataaatggtaaatattttttgaataaatgcttttttgagcagtaagtttttaatatatcatagaaatttaccaggtagacaaggaggagaagttattctagaacataaagtgtggaaatgtttgatatctgcatttgtttttttttaatttcaatagactttacttttttagaacagtttaagtttacagaaaattgaacagctaatacagagagttcctatatatgtgtgtgtattggtcctgtttttttccttcttcaaagaacagagacatgaaagtaacatctgataataacactttatattagaaaattgtcagctgcaagtaacagacactgtaaactggcttcgtaaaaaatagatagatgatagatagatagatagatagatagacagacagacagacagtcagtcctggattctggtggtctccaaggttgattcagctagtcgtggatgctgtcaaaaacccaggtgcattgcctgtctttactcagtgatccttggtttgtcctaattcttacgctgatagcaatgtggctccaacacttcaaaaaatcaacataagctcagaaatattcaaaggaatgagagagcatctcttccattggctccctcacagcatgtggaaacttttctaaatccgatatacccctggaactggccagggggtcagtgtgtcctggcttggaagtgatgtaagagaagtcaatacctgaacatgattggagttgtgtcaatcagggaaatggggcagggggatagggttggaataggaggagtggaatggtttctgagtaagtaagcagtagtgtctactatagagtttcttttaagaaagcataataaaatacaaatggtaaattttgatcaggccttctgaaaaactggaatttttttcagctccaataaaccacattttttctgtctccctcaatcatagacacccattgacatagcaccaattactctgtttatacttctgctactagagaataactatatatagaccctgtatatatacagggtctcctagcttaatcattaatagaagttaatcagaagaacaaaatcagaaatcagactctatatataccctttaattcaatcattcaacagattttttactgagtttcgacaacataccaggcattgtgctaagtaatagagatacagtaatgagaagaaaaaaaatggtcaaaaagcttatagtctagtggaggagattacattaaaaatgaaattatacaatgaatttgcaaaattacatttgcggtaagtgctgtgaagagaacttgtctcataggtgctatgagagcgtaagatagggtgattttacctagctagggaggtcagtggcaaaaatagaagcaaaaagagaccttgaagatgagtagaagtgaacttggcaaataggggagggaagatatttccagagagggaagaatatgtgcattggctctgtgacaggaaacaacatggtaggtaacaagggactgaacaaaggccagtgtggcttgacctcaagggcaaagtggaacctgattcatctggagcaggagacctgttgtgtgcaccactaaccccatcccatctcttttgttgttggctctgcttcctcagaacttctgctgccttatgatttctgttgactgctttctcgctgtgttctagcttcttcccactgtcctcttcaggccgtctctgaatatcttgaattcagatcattaagagagatcctctgattggaccagccagccaaattcatgatagcatggctctgatggttttaacaaccacagactgtagctaccctacttagataaccgcaggtggagtatcccttgtcgcaaatgcttgggatcagaagtgtttcaaattttgaattttttcacattttggatatatataatgagacatcctggggatgggatccaggtctgaaaatgaaatttgtttatgtttcatatataccttatacatgtagcctgagggtaattgtatacaatatatttgaaatacttttgtgcatgaaacaaagtttgtgcattgaactatcagaaagcaaaggtgtcactacctcagccacccatgtggacagtctgtggttatttggcatcattatcattcttcacactgaatttatacgctactgataagcaatcattttcttacacttattcatacataagtacataacagtaaaaaaaaagacacactgttaacaccgtgtaaaaacaatgtgttcagtgtaactaagcggcacagcagcatcacagaatacctggatcagctgttaaacagcagcaacaacagtcaatgcaggctttcagtctctacctaccatgctgggttttgattagaaggtaggaggttgtacagtaacccccgtgaggacactgaataaacagtgcgtcacatacctgcgttatgactgtgacctgtcacgtgaggtgggatgtggaattttctacctgtggcctcatgttagcactcaaaaagtttctgatttttgaacattttggattttgtgttcccacattagagatgctcaaggtgtacttttaatattagtactcatcgtggttcaatccagggtggtggcataattggtaataaacatggtacaaaggaacttttcagaagagggtgtcacccatgttccatctagtccataacaaattgggaatcactctggaatgttttaatatagctggttttaatcattatagaccatgtagattaataattcttttgcatatgtttcttattaaataaaaatcaagaaaagtattcataattcattagtgtgttaaattactgccatgtgctaggctctgtgctaagtatgaagaatgcagagacatacagaattcctgccctcagtgagtcaataggttagtgggagacaccaagaagtcaaccaacaattatagtttggtaagtattataaaaaggtgggtacagggttcccagtgggagcagcaggatctcctagcttaatcattagtagaagttaatcagaagaacaaaatcagaagggatctgccagtcagaagaaatatcatttgcaggggcacaaaagtgtgacagaacacggcacactggggagcagagaagtgttcaggatggttagaatttaagagctaggaagaatgcacattgtggctaaataggggattttatactactattaataataacatttgccactttttaaatacctactatgtaccatagtatatatgcttcatatgcataaattgtactatgattttgattttcatgacattaggatgcaaatttttaaaaaatgtttgaagctataatggattaaaattaaaaagtgcactagggccgggcggggtggctcacgcctgtaataccagcactttgggaggctgaggcgggcggatcacgaggtcaggagatcgagaccatcctggctaacacggtgaaaccccgtctctactaaaaatacaaaaaattagccgggcgtggtggcgggcgcctgtagtcccagctactccggaggctgaggcaggagaatggcgtgaacccgggaggcggagcttgcagggagccgagatcctgccactgcactccagcctgggcgacagagcaagactccgtctcaaaaaaaaaaaaaaaaaaaaaaaaaaagtgcactagtatttgtaatacatgcagttttcttcaggttaacataaagaaatgttaactagagaaaaaaatatttttaattaagtcatatttgactattgctacaatcattactgcaactctaccctgtaatcttgtttcattctggctgtatctaaaattttaatatgaaatacttttaaaaagagaaaataatttgtctcgacaatttataatatttgtaaaatcagaccctattacctaattagttaaaacaaaaacctctaacccagaaatccaaatgatctgaaacagaagaaaataaataagtctatagagagaagacatataaatataactagtttaaaaaattagcaatatgcagaataatacatagagaagttaatgtattcagtatagaaatgaaagtaaatactggaaactagaaattcgtttattttcagtagtatagagttctggtctccccacctcatccctttgtaaaataatagcagagagaaaaataaaagattttagactatgccaaatttgagaaaatgaggaaacatagccaaagatacaatatttacacaagaacattcatgagtaggacaaaaatgaagcaactgtgccagtatcatttttaattttgagagttttaccatgatttgagagtatgtgtttgaagatgaagtagacacagaggactccagctgcaactcagtttgtttgtaaattaaattttaaaatattttgctcaacaaaaattgagttccttctctgtgcaagttctataaggaatacaaaaatagagtacaactcagtctctatcctcattaagtccattttttaggggatgtatataataagatagatcaatttaaaaggacctgccacaatgtaagagatgctattggagaaatacaaataatgctcttttgagtagttcctggttctttactaatgaatataaaatacaattcacatagatttgaaacagtattgcacttctctagtccaaatagcgtctaccttgcagccacagcagtgatttctaaagtgccagtttcattgtctcacctctttctttgttaaaaatcttatagcagctctccattattctcagaccagagtccaaactctaatgtgagttatgagatctcgccccacatcctgctgcccactcaccctttgttgttctaattttatttttcacctctctgcttcttacaatatatgcacacacagtctgtgtccgttgcccccccacccccagcactgtgtttatgtatctttacatacatgtttacatatgtgttgttccttctgcttggtacttcctttttccccactcccctgccttttcccattatttgtgattttccaccaaactgtgaactcctagagatcagggactctgcttctcctgttcaccattggttcctaatggtcagctgataaatatttgttaaattaaaggaacggaagaaaaataaaattgataaaccatgaggacacttggtagaaaagagctgacctaattatgggctgtttataaaataggaagccttcttgcagtttatcactgcttatagtgagactggtagctggtgtcccaaatagttgggcttcgtagttaagagttaagtgctatgattccaataatgtctaggatacaaactaccactaaagaaacaataaatgtggcttttagttcagtaaaaggctatgtgctgtggtccagattttctacatctgttttggtgatgtcatcaacaaagattagaaccagaggtctgcatgggtgtgtgtgtgtgtgtgtgtgtgtgtgtgtgtgtgtatgtgtttgtgtctgtacacatgcacaaaaaggtagggagtaattgcagtagtaggctgacatttgttaagcatttcctgtgtgccaggcactgtgctgagcattttttgaaaagagctattaatatctcattcaatcgcacaatgaccccatgaagttaggtaccattatttctccccatctttagataagaaaaccaaaacatcaaaaatcaatgaacttgcctgaggtctcacagctagtaagagaggcagacccaggggaagccttaagtctaaggtaagcaggtccataaattgatgaattagagaaaaaaaatcaagattattaaatcaaaagttctctacggatgggctgcctatatttcccccaattgtaggatgttttgacaccccccccccaccgcatacccatatgcccatgtaccaataatggctgtgtttataatggcatataataacattcctaaacacagccattatagcaacattgtttaattttcattgaggatgtattttctggaaagcttcatttttccagcttcatttcttgatcatttttgtttgcctcacagttaagccatttccaatttttcccgttttcagttttatattactgaattattttcatcaggattaattcttttccatgtaagttttatggagtgacttggttctgtgatcaatcttttggtccatattacattttactgactatagtgcctgcccttgacaattttattttgatgatagtattcattattaattgaataaaaggctaaagtgaaactcttctaccagatatttgaagatttctttattgtgtaggagtggtctatagcagttgttctctaactttttttcaccaattttattataaaagaattttataaagctctataccacattgcacatgtttaaattaacagttacaattttccataattttaaatattttaaaaagacgtgatatccagtatgttctaaatattactattttaaaataaaattgttatattacttttcagatatatccagtagaataaaataagtagagtagtgattgattactattatcatctgttttaagatgtacaaataagctcttttttcaaatgaacattttatataatttctctctttgaactcatacttcctttcaattccttcccccaaatttacctaatctaaaatatttgtgcttgtgagtcttttttgatcactatgttatactactctgcaaaaagtgtatatacttactgattaaagctttagttttttaggttcctaagaccataacattctaagtatttaaattttttattctgaaataaattgttacaaatattattagcatacagtcatacaacagcataaatatattgtgaactttgaaaaataattaagcataaaaaatgaaattatattagaaattcatctcttaatgggatgaatagttaacacatgcacatatgaatattacttattgctacaataatacaggaatcaatattagagctacttataactttcttttttatagaggtgttgaaaaatcttgttcacataagtaaacagcatgtcgaagttgtattatagacagtgttattcagtgttttctactctttccaagttgtgtgctaaaaatcacataaggatctattgtcagaagttatttttaattatctctcaattgacagcccatttagatccaacttctcctctttgaaagtaaagaattgggaaaacatctgacttgcaaaaggatttttttttcagtccagtcactgggaacattcactttccaatgcctccatcaggtatttcgaatcatccaatttgatgctcctacccctcaacagatcttatactccagtcaatacaccatagagaaataccattttttattttattttttaagtgggagaatggcaatgtgtttttcccatctcctttttggagatgggaaagagaacctgtactatcttatgtttctccatttctttggtagggaaatagcatcaccaagacatgtggtgagaggtgggaagggagtgttccatagctgctccccacatcctcactgcatgtgccacacagcaggtatcagtcagacatggtcttccaggtggtcattttggaagtcaagcctctcccagtttgtagatcgactttccttcagggccttggaatcttctccattcagctgacagtttaaaaagagcatggatgatctcatatgagtgtggacctgaaatttcttttgaactattcttcttgaatatatttgctgtaatcctgagccattgccacaaattccaaatttatatgaaattataaaagtaatagggatttgtaactttaaattgcaccacaacaagctctttaattaaactgttgaggctgcaagtgtggattgaacgcgacaaccttaggaactctaaaaagggtttgcccagccttctgcagcattttcaacaattcgtaacaggaaattcaactggaaacaaaatttagatttttttcgtattcaaagaaaaaaaatttgtaatacttgtgctaatatatgcattagatgatttgagatcagcaaagctatcactaaacaagtatttttttaagttgcacaatatttagcttccttaaaaagaaaaaaaggtgaaacttttttcatctgtgatttgacagtcatttacatgtttctgacaacatatacatgtccgatacgcatgagtgcacagcagccttgtatttttcaacatgatcatcagataatatgtggtaagcacatatttgagtaggtggtttacaagggatttctatgacatttgtattgtattactttctatgtaccttactttctatgtgctttctatgtactttagttcataagtgaactaaaattcataagtgaatggggcagacttcagggtatgagcctgacatgaactttctcccttcacttcttttggatattaagcagttagctcagtatagttcagtggtcacttaagaaaatcacaaagttccataagatttggggtcaagatgctttaatattcttgcttatgatctgtatgatgtatcaaaaattatgtttattcagttctcaaaaatgaaactggatgggatagtatttgttgattagatttcattgtatattaaatactttgaagaaacaggcaggcacaagctagatgatatgggaagcttggcttaagaaagaaaacaaaaccacaaacctcaagtatacatgaaagtacttaaatgacagaaaaatatcttggactataataaaaagcaaactgaaagaattattatagaatgtccttaaacttatagaaaattatgtaaccagtaaaggtataaataaagaagacgattttatagtatcaggccatatttcaggcctgagcttgatgcccagatttttatagaaatgtaccataaactcagtattcaactgactgtgattgatattcctttacatttatgaaagttatacagattgattaactcatcacttgcctgaagcagcatcccctccggtcattctgcccccatcccactgcattccactctatcctccacatgcctccctagcgctgtgcctcaaatctcactctgccaccttcctgctaagcttcaggactttcccagtgcctgtgagcagagcagggtaacagagccctggggtatagtccaaggaagccacagtaatcacatgtatctgagtaccagtgttttatcttaacaattcattcatatttgcagtattttccagcctgtgctaattttactacaaaactgttttaaattgcttaccagaaataaaattgatgctcaagaaggggttccaaatgatattctttgacataccttagtatacattttcccatgtgagaggcgtaagtccataatatcaagtcaaaattgcttagcctaaagcccttccataactcctctggagtcaaggaatcctttcattgtaaaggtagtgtcttctcagaatggatctaatccagtcgaaagttccatggtagtgcaaattaaactactaaaaaagagaaaccagctgtatttagattactgttttggttcttgattaaagtcagcagggttgtttggtggactataccattaggacataaacatgagaagtctgaaggccacattggagagagcttcttctggtttagcaaaggagtcaaaatgcacatactctgtacaatttctttagaaccttccccatatgtactatttctatcagtttcccattgtgatttattaaacaaacatatatggagcacatatgtgccagacactattttaggcactgtgtatcgaacagtaaataggatagatgagagttctattctcctatttgatgtcacagggaggggacagacaaaaaacaagtaagaaaattaatcattttcatgtgcagaattaaacagtgataagataggctgtgtgttgggatcacttgaggtcaggcattcaagaccagcctggtcaatgtggcaaaaccctgtctctactaaaaatacaaaaattagctggttttggtggcacacgcctgtagttccagctactcagaaggctgaggtgggagaatcgctcgaacccaggaggtggaggttgcatgagaggagatggcattgttgcactccagcatggctgacagaatgagactccatctcaaaaaaaaaaaaagagatagagttacatgataactcttaaattgtgtgtcagaaaaggcagctgagaggagtagatctaaaattattattaatttttttttttttttgagacggaatcttgctctgtcacccaggctggagtgcagtggcatgatctcggctcactacaacctctgcctcccggattcaagcaattctcctgccgcagcctcccaagtagctgggattacaggcatgtgcaaccatgaccggctaatttttttgtatttttagcagagatgaggtttcgccatattggccaggctggtctcgaactcctgaccttgtgatccacccacctcaacctcccaaagtgctgggattacaggcgtgagccaccgctcccggcctaaaatttttttaaataaaaatgtattatggaatgaaactctttttaaataaagaaattgtaggatcatcttattccgtgatcagtcttgaaggtaacaagcagggaaagcaggaggtggtttgctataaaaaaaagaaaagaaaagaaaatgaccctaggctctatcaggttttcctagcagggaattatggctagctcagaacatcgtctttcatcagcccttttaggatttcagatgcttaaatataacatgggttattgtaaagtaattaggtaggttttttgaaaagcatataagaacatacataaaaataatttttcttcccatgtcccctttggtaagggctgaacacttatttaaatgatgttgccattgttcaaaatagctttggacctttggatctgtctttcagaatttgcttcctaagccatttagaagctactagcaaaatcattttcttttaattttgttatctctccttgtcctctttgcatttaagctttactgatcttaggttccttttttcttgctgcagagggtccctaaggaccattatgctcccaggctgtagctaagagaatggtgataggaaaactgagtttgtgtattagctgggatccagtcaggggagaggaatcagagtgcaatttagataggaaaagtgtgatacaattatcatataaattatgccaggagattgagtaacaagggactggctagtaagaaataaagataactctaaagaatattggccaggcgtggtggctcacacctgtaatcccagcactttgggaggccgagtcaggtggatcatttgagatcaggagttcgagaccagcctggccaacatggtgaaaccccatctctactaaaaatacaaaaattagccggatggtaatggcacgcatctgtaattccagctacttgagaggctgaagcaggagaatcgcttgaacacaggaggtggaggtcgcagtgagccaagataacgccactgcactccagtctgggtaacagagtgaaaccctgtctcaaaagaaaaaaaaaagggaattgatgaagccatttatgggaggtgtcccaacagaaacactctgctacagaacggctcggggtgagggaagtactgagaaaactgctggtcactgggtgctgggagcatcatgcgtcccagagccaagtgctggagaacaggcgcctgccaagtgagaacaccagaacagagaagaaaaaacacccttcctcctgtgtggtctcttcagtgccctttcctgacaaagtttaatgctatgacaggtagcaaaggaaaaatattttaaggacacaggttcgttttcacagagcaagcaattaagggtgaatttgcacatggaaggccataaatgaataattggcacagtttataaaatacagttttacatggtgcacttaaggagtcaaactaacatactttttggagctatctgcttgctataactaacgtaaaaactgataacatgcttaatggaaataaatgcttggtcaaattttcattacaccatagctccagaaggaaaaaataagtcaaaatatgactctgtgtgtgtatacacatgtgagatattaatatatctggacctagaaatatagatacaggtatctttctgacataatgctatgggtataagggtgccaacacagctttcatgggaagatctatcattttttctgatattatattcactttactgtttgggttttcaaatggccatagtatttttagtaccttagtgaaataattattatagttgaagatagattttgttgttgtggctgttttgtcttaaaatgtttcctacttgacaaaaaaaagagaattaatcctgtatcactatccctttcctttttaaaaatcatactggtctatgaaaatcaaatatggaaaccattatagccaactaacaatttataaatataaattgtggcaagtcactataacccttttgtgaaatgtacaagaagaagttttgcatttagaaatcaaaaaccaattgtcacctgatgctcaacaacaaggagacataaattcatcaatggaacttaatagccagggtcatgtactttatgttctttgtctctgcttaaactaaccatttccaggtatcattatcactgtttttcagatgacaaaaaccagatggagttaaataattgtttttcaaaatactgtagttggtaaatagcagagccaagagttaagtaggagtctgaatggctccaaaatgtttcagatttaaatagacgtctgactgcctccaaaaacctttcaatgtctagagaaagacaaaaactgaattaagggttacaaaatgggattttcaaaaaataaagaccaaaagattatacacttacatattttatgtatatttcctagagaaaggaagtgtaaaaaggaacttcataacttgttttcaaatgtatatatgaatataatgcatgtaaaatgaatataatgtatgtaaaactcagtaactgttttcatttccaccaaagcaaatataagtgcggtagagtataccacagcaagtagaaaagtccctctgaattgttaatacacgttggtgtatcaggaaggaatgtgcttgttgtagatttgaggacagtagcttaatcaaatatagattatatacatggtaaccagaagtccagatgtggatgcttgctgtgattgtttcagtagctcagtattagagccaaccttggccttcctctcatagttacacaattgctgctacagtttcagctatcatatctccattcaagcaggaagggcaaagtggtatgccagctatatatgactcatttcatcagcttttctcaaacatcctcaactgcttttggttttgatctcattaaccagtgcttggcctaatgtccttccacaaagttacaagggaatttggggaagcagggaataacattgtcaggactggcttagaccatgggtcagccaaactctgccctgggggccaaattcagctcatacttgttgtaaataaaattttgttggaatacttccatacccctttatttacacattgtctatggctcctttcatgttacaatggcaaaactgagtagttgcaactgagaccatatagcctgcaaagcctaaatatatttactctctggccttttacagaaaagtttgctgacacctggattaaaccaatcatgatcctttgcctggggttgaccatatggacactttgggggtagctgggcttccattaagcaaggaaggggagaaaggatattggaaagaaccaacaatatatgtctcacaggtggtcacctggtccaattaattatatacaagacccaaaagtgataatatattttcggttttaagtcacagagtctccttgaatatgtttttctactccttcttttcctcaagacccaactaagacactttagaaaggcagaaattttgcaaatacacagtatcaaattattgacaatgttgtgacagacagtgaattcatttctagttttctgacttttactaagttactgtcagagtagatcttaaatccatattttattgattgacacttccctttaaactgtttattttaggttcttgcatacactgagggacttcacggaaaatggatgttcagcgagatacgagctgtattttcaagacgttaccttctacaaaacactgctttggaagtatttatggcaaaccgaagtaagtccccttaatattttgaaagaaaatgtgctcatatttacatattattcatttacatggtatgataatgtcttgatttttcctactgtatttctgatgtgctctagcttaaacaaacagaaattctttttaaaaaataaaaaaagaatgaatttgtttgaaatgttagccctaggtttctcatggataaagttatactgaaagctgatttttcatgaagattcattagctttacaaataaatcatgataggcacttgaagatgacttgtaaaattgatggctaacttatcctgcggttttctaaactctgttttttttcttcttaccacagcctcagttatgtttaatttccctgatcaagcaacagtaaaaaaagttgtctatagcttgcctcgggttggagtagggaccagctatggtctgccacaagccaggtaattatatcatattacatattatctatggcttgttaacatatttcaatctcaatattacagcaatgtaaatgtggttataacattataattatttcagagaccaaagaattttctttctctgaaggttatttgtagggatagagattatgaaaatagctattttgagaatgacagaatggttagggcagatttttatttaatacatataaataacaaagtaaaaaacttgattgcttatcacatagctagcatataattaagacattcttgcttgttaaaatcttacaggaaacataccaaaagcctgaagatcataaatgattaattgctatgtaatagcatataaataatgtttttataaatgccatatataaatgcttcttaattaaaacaataaaaccctgagagtttattaagggtaatagtcattaattatggtatagttgtaaccacatttcctagattttcatcttggtattttagaagaatcattttgaaatcttatattattaaaagatactaatgtaagtagaaaacataatcagtagttacttatattgctgatatcagtttgtcgtttttggctcgaaataactgaataccttactaaaagtggcttaaactataggggtgtgtgtgtttaatataaaagatctggagttaaggtgctgccagtattggttcagaggttcagtgatgtcagaaccctgttggctttgtattcacaaaatcaccgctacttcttcagctactacatcttcacacaactgcattacagtaggaaaaagacacaaaggatttctctttaagcttctctgttttaggaagaatgtatttctcagaagcctaaagcaatctttatcttaagtccctttggccagaatacagtcaccttcccattcctaaaacaatcactgccaaaaaggtgtgagttctgttggcttagcccaatcattccctaggttttatggaaaaagatacctctgattctttgccagctcctacatgaacaaaagaggatttccgttgatgaagaacaaagggagattgactttaggtagatacaacaatgtctaccacatagactgttatgtccttgagaattattacacagcactgtatggatggaaaggaaaactaatctttgtctatcctcccttaaataggctacagacaactgaaagacagggactgtgttttatttatcctttaatctacaggacctaacacagtgcctaattgcagcagtgctttttaagtgctgtttagctggggttaccttgtattgcaacttatctattctctttaagcttacagtgtaagaccaattcactgacacgtatacacatgctcaagatatttgctagtagaatgacaagattaaactaagatattagtagataatgaagcacttatataaaatacaggtcaaagaaaaatgcatttcatctatcaaagaaaatgaggttagttctgcaagacttgttcttattgaatctaagctgactcataataatcattacttcctttcccaagtgcttacatactatttgtttaatcatcaattcaagaatttactcaggaattgacattaagaacttacgaatgggcctaactttttcctatttaagaataatctcctgtcttctggcatatttctcaatgaccatgattcctgaaagattactaatagaggtttctatatggcatgtataatttccctcagtattctttgacttgtctggaccggaattcatttaaaacaatcagaagctcttttattttatttcttacctatgatgagtattgtttcccttttaaccacatttggtctctttttgacgtttggaagatcattcttttttttttctttgagacaaggtctcactctgtcacccaggctggagtgcagtggcgtgatctcagctcaccgcagccttgatgtccccaggctcaggagatcctcccacctcagtttcccaagtagctgggaatacagacatgtgccaccatgcccagctaatttttgtattgtttatagagatggggtttcaccatgttgcccaggctggtctcgaactcctggactcaagcaatccacccacttaagcctcccgaagtgctgggattacaggcaacagtcaccatgcccagctggaagatgattctttataagaaaactgaaaacaaaaggcagctcagtagttttggtctctctgtaattcataatgccattctatcttcaaacgtccttttgttgtccttggcttattttcccccaaaaagctcaactaattattagtttcctaataatattcttacagactcagttttatgtacttccctagatatacatccttagaagtaccaagtggcaatggggaaacactgcatctaggcttaaacctgtcacttagctgggtaacaataagcaagcctcacacttagtagcaattcaataaatattggtggaaagaatgaataacactactcaagcagaatgacattcttatctaccataaaatggggaaaatatctttacaagagatattctgccagagatattttgcaagatatctttgcaagagatattttgataatcttttgtgctatgtacaagacaatgcctattaagattccatgtgaatactcatgttaataatccatgagtaacagaaatagccttaagtctgttgttcccaaactaaacacgaaggagtcctgcgatatcacagtgaattctcaggggtgctgcaggtcattttttaattttttagggaaaaacagcaacatttgtcagataccacacaaactatttgctcgagttagttccaagtttcaacttagaatgattagatagggctgcatctttttcagtgacacctctgagaaactggtgtttggtggctactgtcttcaaaaacaagagccatatgaaaaatcagtgtggaacaggaaatgagtgtggtggtgtcagatctgattccaaggtttcagaagctgtgcagtttccaacagacatacacaccccattagtaaatgtggttatttaagaatgaaatataaatatttctctttaagtttatgagtattgtattttcaaatagctactcagttgttaagatgttaaatatttattgagttgttagagctaactacttaataaacagaattgtaagatatttctcttggtcaaggagcactatgaaaaattatggagatactaagggtgccatgaattgaaaaagtttgagaacctctgtcaatcagtttaaaaacccagtagctttatcatacttttctaaatacaactgcttttgttatttttagatgaacacattgaacctggaaagtttcataatttggaccaatgatcatggtttattcccttaggctgttcctatgtcccttcttctggacccatgcattttttcaaagttcccagttgtttatattttacaccattgcagggatagatattgtacgggcagaggctgtgcatgtgtacacactctgtgtgtgtgaaggcaagtcgaagaagttcattgatagacattaagtcaaatgcatgtaaacaggtacctgactacctacctacctacctaattaacatggagcagatttgctgtattgtttaaaagctacttgatttatcttaagtatagttttactttttttcttgtggatttgtgactcatttgcagctgtgatttgacaaataaggttgctttcaaattgttttatcctgagtaattaagtgtatcttctctataatagaattctcaaatattgctaatttctacaattaaaatatattttctaattcatctaagaaggataaaccataaattattttaagttgattatcaaagcaatatattagttaatattggattttttaaagttatgaattaaagagactatgtttgttatgctgtgcttaattgctaggaggatatcattggccactcctcgacagctttataaatcttccaatatgactcagcgctggcaaagaagggaaatttcaaacttcgaatatttgatgttccttaatactattgcaggtaagatgtctcattctttaatctaataatatgtttatgttcatcaaaatcatggtaatgtagcctgatataatacatttttctctttggaattcaaatgcatcattagagtaaattttgaagcactcacattaaattttatcagaaactgtgcaagctcataccaaacttttagatgcatttattgttgaagaggcttttccttgctttccttctgccatttcctttgctgacagctttgtctgaaggtttattagagtcaacaaaccattgccagagtgtctggaaataataatgggaaaagtaatttcactactttgtcattctcagcaatagcagctagacaggagaataacaacaggattctgcctagtacagatgtcacctggaatatggcatgattaggttacagcatctttttttcttaaaatcttcaaataaaaatacaaaatcagattacattttctaaattatgagtaactgccatcaacctttgcagtaccatgcttgcaaatcaaaaggaggtagtggctttgttttctgctaaatcagtggttgtcagtggttaaacatgtctatgagatttaagtacttcatcttttttcttaagttaagctccaaaagcccttattcatgatgaattacaaagagtttacttctataaaccaggctctacaaaaagtttttgcaattagatgaattcaaataaccacataaataaaggtgcttaccataattattgttttgttatgaatgaatgctcacaaccgtgtatttagagctgtgtacttctctgaatcattactttaaaaatataactatgtaatattactcttttttaatctatcatacataagtgtgactaaagatactataggtatatattaaatgcgggtaatatagatatgtattaaatagacaaaacttgatttgtccacaaaagggaataaagctatttgatatattaaaatgctttttcactttaatcccaatacattcatgtatatatatgttcatatatacatgcatttattcatatgtgtagtacatacacatatatatcttgaataaacctgtttactccctcaaagataaaagaaatgtgttatactatttaattagcacattatttataaatagaatgaatttaaacatctgaaatgtaaagaacttaatttcatgagcatatttaagtaaatagcatggtgtagcagaaagaacacaactttcaacaccaaagagaagagggagagaatcccagatctgccaactttctgtcctggagcataagttgaattttaacttttaactctatcgtggacttttaatattttaatagcaatatttaatatgtttacatctgttttaataactggtatgtttggtcttatatcatcttgtcttatacttttttttaatgtcctcttgctttttatattgtttgttctctggctttacgaatgcttttttgctcagtgctcttgtgatttaaaatgtaagcaccttgttattaattcccctagagatattacatttttaaaagccttataaactatttttcttaatttgaactcaaaaatcaattaacatttttaaatcatacctaagacaaaaacttcaactcaattttatttctcattcattgcttatattcgcaaatataaattactagccagaatccagattattattaacttcacactctggggtctacgtctttttgcaaattaagaaagatttcaaactattgaaattatgtgttcatgcagtatattattttcagctatatggatctttacctgatttttcgggatgatattctctgtacgttcttgtgtaacagttttccatattccctgtattaggtttttatattatctgctcttgagagacctatcaagacagtatcattagacaccattaggtgattttttttcccttggctgtgctagctatttggagctgttggatataaaactggagggcagggtgatatacctcacttgtagttcagtttccaatgtagcaggcattcatattaaatggttttcctattctaaaatgagattttctccaggctctggatggaatgttttctagttcattgttttaaaggtctcttctagtctccatcccttcccactgcattttactcatgtaaggtcagtttcccacagtgtggtacagtaccacctataactaccacccacttcatgcctgttactttctgggagtctctttatctgtccaactctggaaaggttgctgtgtctaaatctggatagagataacattgtcatgccttctaaaagttacacctgagcagtatagagcctaatatgcttttttctatttgggacaatctttgggtttctgagccagagcatgcagactctggtgggaatttaaaagcatcttgctattattgtttgaatcgttgaagtctgttttatttataacatgaagattatatgggccactgatttttttcaaaaattactgggtacttcctttgcaattattatgactaaacatgaaagcctgactattgtaagcaatgggataaaaattaacaatagggactaggcacacagaacacttacagtctagatgaataagtgaaatacacgtaaataagacattttaagatggctgatagtaaatgctgaatcattgctatcgtgaatgctgcatgagcttagcagaggggaggcattttaaaatgtgtttggggagaaaaaaagagaagagcttcacaaatttctgctagttgtatatatatggtgtattcagtggacagaattatcataccttctgtggagtagagaattatatataatattggagccttagagaagagccagattataaagaggcttttaggagtcagtatagtgttagagtagaagggaatgcgatgtggagttttagaaaaattaaactgataattatgtatggcataaatcaaaattgagattccttagcattagtgctataaggggagtagtaatagtaaattgttactgaatatttactatgtaccacatattctatttttccctgactacagaagcaagtaaagtatggtttctgcctttgaaaagatcgtaatatagtgaggaagcagacgtataccagtaattccactaaaaagtattggaatgtataaaattgtgtacaattttataatgtataaaaaagtattataatgggagtatatgtgaagccatttgaggtagtcaaatctaggagccattatttataactaagagagcagaaaaagcttcccataggtgacatttaaattgggaattgaaatatgattaagagttcactagaaagtaggcagagggcattccaagaagaaaatgtgaggtgaagattttggatgagcatatggcagcaggtatggcaaaaagagagtaaatgacactttgtacaatatcattatacaaaaaagtttcactgtcatttgttctagttcagtggttatcaaagtgtagtcccctgacctgcactattaccttggagacctgttagagatttctgatcctcagactcctcctcaagcctacagaatcagaagccggcaacctgcctttcagcaagccctctagttggttctgatacaaaaagtttgagcacaattgcattagccatttaagacctaattatcagggcaagatttgcatataaaacatttaaaacatagaagaaagtacaggattaagtgccattcagtgtaataaaagtttagagaagtgagagattaatatgaaatagtctactcgaggaaaccttggaaaagatgagctttaaatgaactctttaaggattttgtcagatgtagatgactatccaggcaaaataaaccgtaataagtagaatgacaattgaaaaaaattatgaatatgaatatcctgaggtactctccctggatatattcctattaatttaattcttcctttgctatcatcctgaaattttaaataggagtgccagtttaaactgagcaccagcattaaagacatgggtgatggttttcttagagaagcttcagtaatgccatgactgaatacttgttagggcagcaattagatttgcctgttttcctgattggtggacagtgtgtatccattcatctcttcttatcaaatcacccttcagagttctcttatgatcctaaaataaagggtgctctaaagatgttaagttgtaccagtatcactttaacgaacacgggtcctaaaaataatcatactattttataacactgttttagggatacggttattgttcaggaagtatttatttcatttgattgattgaaacttaagatttatcatttctagataggatgttagtcttctttttgacaaatgtaatttcttaggtaatctaaagccaagacatggttggcttatattttgtcataatatgttttaaacatttttatttgatatcaagattcagaaaaaaaatagtattgttattatgtctttctttcatttttcctattgaaacattccttggccgggcgcagtggctcacgcctgtaatcccagcactttgggaggccgaggcaggtggatcacgaggtcaggagatggagaccatcctggctaacacggtgaaaccccgtctctactaaaaatacaaaaaaattagctgggcgtggtagcgggcgcctgtagtcccagctactcggaaggctgaggcaggagaagctgaagcaagagaatggcctgaacccgggaggcggagcttgcagggagccgagatcccaccactggactccagcctgggcgacagagcgagactccgtctcaaaaaaaaaaaaaaaaaaagaaacatttctttgttaataataagaactcagaaaaaatagtaaataatagtttatgactattgaataatttataatgtgccaaacattgttctaaggactttatatatatttgctcatttaatcctcacaatagccccatgagttaggttctgttcttatccccattttacagagatgaggtagagagtagctaaataacttggcccaagtcatagggctaataagtgacacagtcgggattcaaacctaggcagtttagctccagagtcttcattcagttactacagcgtactgttccaggatattcctggtaccatacaacttcacctccagtcaccagctttaacttattagctgcttttaaaacctaaataattaatgatttaaaacaattttgtaattttcttttacatttcatcaaattaaccctttgaaatttatttactgtcatgacttttgtagatactgatattctagtactagatctgggcctggaattactatctttaatgtagaagctggcactgttttcagttaagctttagatcaagagaaaaagactctgagacagagatttgcttgaggatttttattgaaaagcccttgggatcaacatctgtgggggagtgaagaagttagaactgggcagaaggaggattcagacctcagtgcagttgtgacaaaggcttcagtagatcccacagggtgcctggggctggggtaaccgttcaaagttgtcttggcttgaggcaagggagccaggtcttcattacctccactctgcaatcattggatgcagactcctgggaaggagacatgactggattgggggctttcttctaatggtagcaattcttcgagatggacatagctgaacaccaccagccatgaacaccaccagccatcattgctcccagcatccaccataccagcagttctcagacttcagtgtatccaaagcaggattgctaaaaccctgatctttggttccctactgccataagttctgattcagtaggcttggattgagccgcaagaagctgcatttctaagaactccccatttgatgctgatgccattgatctagggaccacactttgagaattactgccctatatctatatctttaaaagacatacctaaaaataattttattaatcttcatatagcaccgtcagtatcacacatgatgactcttatgatagggcatccttagcattttatgtgcattttatcttcccaatgagaaaaaaagttttgctcagtaaatacccatgaaattaagttacttaatatttatttttgtaaatatttgcaggatgttgtgatctattatgtaaattcactagaattactggacgagggattctttaaacgtcttggattaaagagaagtgttacagaattggaatctggttgacaagatgaaacaatcttttctggcttcacatgtttaaaaatataggtcaatgtgacctaataaatttcatattttctataaatattatccacaaatattctataaataattctaagacttagattaaaacagtaccaaactgtacattattattacactctcagatttatcttttttcccaaaaatattattttagtatgaaatgcaaagtacattttatgacccatttcttaaaagtgtctcatacttgaccaatttcacttttctcctttctagatgcttttaaaaataagattctgtataaagcacatggtctcagtatcatagtattaatgcattatgcagactttttacaccctcctgtggtatgtgtacatgtgcataattgcatataaataaacacacatttactgtatgtaagttttgtaaagatactttacatagaagtatcttgccaaaagaagcttgccaaatatcccggaaacgtatttaaaagacatctaaaatcccataaatgtgttcttaggctttgttttattctatttataaatttaatgaatgttcattatagaaaattggaaatacaaaaaatggtaattttaaaaattaaaccactcaaaagtctaaccgtaaatatcacagttgacatttgggtgatttttctgtttttcattctctgtgtgtggtgtgtcattgggaacctgtaatgtatacaggtttgctttctactttttccatttcactaaatattctttgaaggcatgacttttaaaactacatgagagtccaacctagaaatatggcaaaatttctttaactatttttgaaacacttgatttttttcaaagaacattaaattttagatgattgtgtaaaataatcttaatgatacttagagttctactaaaaatgtggtttcaactttcagttcccaaattgacctgatttctgtttgttttctgaaaaatacaacctatgccttattttataccttgttagataatattatgcaaaagatattaaagcctgtaattcttgcattttaaaaaataggagagtaaccgctaacacggctttgtgtaaatgatcccctgttaaacttgagaattttttttaaggattttgagttgtttttcatatgatcagctaatgaattcagcacaacttctccaaccccaacctttttctcctgtttagcattttccacttttttactctgtgatgaacaagccctccctggttaattatgtatatatttagcaactgcatgtgttgggcttattattgtcatctaattagatgtaacttgaactgcttgcttctagaaaaatcattaaaaattctttcctaatgacctagagatgacaaaatgtctgtaaagtgtgaagaagcagacaagcacaggaacatcgctcttaaagagtgttaatccagatgctgccatcatctaattaaacaatattttgctgtcattaacattttcaccaaggaattgcagttataatttctttgtcagctgtctctagatcactttaccttcaaaaccaaagtgccatataaaaacattaaattggatggtttaattaaaaagtttttttaatgaagaaacatatccagtgtttctgagatctcatttactgtttcacttttattatttgagtagattagtgtcataggcttgcggtatttaatattcatcttccaagataaattcttataagcatagttagcaaaataaagtgtatgtgtgtgtgtgtgtggagatagatagatagatagatagatagatagatagatagatagataatctccacacacacaaatatatatatttacttaccactgctggaaaaggaaaggaccctaccaattatagcaccagtgtatttactaaatatcaactatcctaaagaaaaaacaaaacaattagtaattaaacatctaggtatgccagagcctcatgagtattactttggaaataactcattttttggatgatttaatgaacagtattttttttcatttcacaaaggtgttcagtaaaataattaaaggagtaatactaattcatgattaaaacatatcaatgcaaaaccccaaagtgccacttcatcactctttttttccatgtaacattaaatacattgtgcatttttaattcaaatcaaatacatatatgactgtccattttacaaggctcttatgcagaaatttttattaaaaacaagcattaatgtcatatttatttataaagtttattatatttattagaattaaaataatgctataaatctctgctaatttaaaaattactaaaattttctttttagcacttattttcaaaggacctctcaaagattattgaaagtgaattacaaaaaaaaatgcaggacagaataatagacatgaaatatggctattggcatcattcattttgtgtatacgtgtgtgtgtatttttaaataatgcttttcttctttgtatttttttcctaaaatagcattattttttttttaacttttattttaggttcaaggagtacatgtgcagattttttatagagataaattacatgtcatgggtgtttggtgtacagattactttgtcacccaggtgataagcatagtacccaataggtagtttttggatccttaccttcctccttccctctaccctcaagcagtatccttttctttcttagaaaatcatttctattaaaaaggctggtgtcttcaaatatagtctacatttttatgctgtttgcattgacacagtacatttaaatactgtgtttatgtaaattggctttttaacagttttccttaatatataaattataaaacttcatcagaaattattttaacaattgtggttatctgattttcatctatcaattaatttatttaagtaatatatgttatatctagataggtagcatcagcattattctattaaaaaaatatacactggaatacttgcttttcattaaaatctacagatttttaagtagaacagctcccccaagaaaatggaagagctctaaactctgccatggacccatttaggatcccagaaatagctctgtctagccaatctgtactctttgtatatatacatataaaaaaagtactgagccctatcaggtgtcctaggttagcatacatatgaactattagtaataaattttcaagtttagaattgtacagcttttattttacaatattggtactgttttagcagattattgtcatgtcaaaagactttaatatggctccgaactcttgtttaatctcatcattagtattattcaccatagacttaaacacaagcaggttcattgattgcttgagctacctagctgtagatgttttcttctcgtttaatgtagacattcacaatatcattctctctcatatatacctctacgcctttgcataatcctcgtcttctaaagataatgttctgcagttttcctttacttgacttatatttgttcatcttctgaaatttgggtcattttattccatttttatcacatgcatatccattccatcaacaaacatttattgggcagatggcatatgccaacacacagagattaaaacaaacaaacaaacaacccagccctgacatttatgagtttacagactggtggagaggcagagaagtaaacagcaatgtatatcaggtgtaatagaggtctgtatgagaactgtggtgaggcaacacaggggaagccctaacctagctgtaacctcatcccagtaaatgcaaagtggaagcaacattctgctgccattacccacacctatattacatacccacacctatattacatacccacaccagtttatacatttaaagcaatatgcagtttagttgtaaaatgcaaagcttcatataataaacagataaaatagtcatcaataaagtgttttctaaatatattaattaatttggtttggtgcttgcaattacagattttggttcttactcagattgtagttctttttttttctatttcacagttatgttttccaaatgctgtaagagcagatatcatttaatgtaatttcctgatgatgaacaagataatatctgcatatctatgctactgtgatagtacatgtggtgtgtgcaaccatggcatactggatgaaactcatatcactaaataccagtgaaatagctgttttgtgtgaattttaatggaaatttagaaaattactgataattggatcataacgcatttttataaaaaataattttgttcaacaaaagttttcttaggatcctgtttctttaatagctattctcttaatttcacctgatcatgttttttcagtttcagtttatgagggggggccgcagcttgctcccctaaactttccccattcccactgtgcctcaatatcatacctgaaatatttaagtcattctaccaaaacataagcagacatattcaccctaagatcgagcagttcttcgctaaagtgaaacaacataagacaaaaaaatatttcatgaacttaaggagtgaaaaaatgtatgattgacatctgcctctgtagtttctcatcctagcttcagagtacttctgtccactcgcaaattctctgcattcattcttgatataagtttaacatagtattctgtgtactcataatataatttctagatatatattcattataatagaataccatcacagccaggtgcagtggctcaggcctctaatcccagcacttttggaggccgaggcagatggatcacaaggtcaggagttggagaccagcctggccaacatggtgaaaccccatctctaccaaaaatacaaaaattagccaggtgcggtggcgcgtgcctgtaatcccagctactcaggaggctgaggcaggagaatcgcttgaacccgggaggcagaggttgcggtgagccaagatcgcgccattgcactccagcctgggcgacagagggagacaccatctcaaaataaataaataaataaataaaagataaaatagaataccaccacataagctgcagatgtgcaggtcagtggggtgacttcctccataattactttcagggcctctgactggcaaggctctgcttccggggttgcaatattatctacatcagcagaagagagatgagacacacatgcaggaagtttcagtgggccaagtcttgaagagactttgctcacattctgtagatgagaactaaatcctgtggccagagctacttgtaagggaggctgagaaatgtggtgtaacacaggaagaggagaatcaattacaataaccagccagtagcctctatcacagtcttataaatagtaattctagttacgtcttaaaacaattattgagtgaattcccttgaaatgcattgttatcagagttaaagatacggttcaataaataaaaagttattttcttctgaaattcagtagatgctttgtaaaaacagaaactatttcataagcattttgtgtgtacaaatttttatttctgtttttctttactaggacggacatataatgatctgaaccaatatccagtgtttccgtgggtgttaaccaactatgaatcagaagagttggacctgactcttccaggaaacttcagggatctatcaaaggtaacttttaaatatatagaagtcagctttcttcataaggctatagtctaatagtatttctgtcagagtatatatagccagttaatgtttgtaagaaggtgaaactgattatcttgacttacatagtcagtttctaaatcttaccaattcttagcacaggaattaagctacaagaagataaactagtactagcataggcaaaatgaaatgggtatttgagaaacagcagatgtagagagagttttctcatatatcctaggctttaaagtcaaggttaaaaacctaaaattagtagaaaatatgatggcaaatcatttatgtgatatgttccttagatggtaagacatttatattgaccataaaatacacacattgtagggaaatataatactgaaaagaaagtcagttaattttaccaagtgtctgtctatatatgagagagaagatatggcccaaaagatggcaagaaaatggtgcataacggtaatgagaaataaaaggcaaaatttttattagctcacctcatttgtccagaggaaactacagtgtgatactaaactgtttgaaattcagtgaagaactgggaactaagcccaaaaagctgctctatagtctaagcttacgccagaggcctgccttaaagtttatgtatgttagccatagtaaagcctcagcccattgacttggaatgtatctctgttttctatcagacttgattgtctgatttagcaatccacagaaagttgaaaggtatttgtgtatacatttggttttagggggcaggtttaaggggctaattgacaagagcagcataagccctgtgatttagggaaacaacattacagctgatttaaaattaatcccacagatggtttttaactcagcatgcctgcttctgccccttttctggcctttgaaacctagacgtacctaagttgaagttctatattgcactagttactagctctgtgacctaaagctagtttctcttgtcccatttgtaatatgagaataataatactgtcccatgtcaaatagttgtacagatctaatgacatgtacatttaaaaattataacatagtacttggcacatagaagcacttcctgagtattaagtattattgttacacatggaatatttcttagcctcttttgaagactgtttgctagttttttcatgttcttatgcgtcattcagtatccaattcttttattttatataactccctattaaattttagttgatagctcatggataattttagctgtggtattatagatgttaaagggacctaaaagatcagttagccaacatcttactgagagtcacacaactggtagaaataaattgctagcaaatgaattctaatacgcttgcaaatatagtaattcttccaaggtgagtcaaccaaaaattcttaactatttaccatattcaggtaactaaattatttaagataaggtagatagaagcattgtaattcatgcagcctgcccttcaggaacaaatctagttatagattatctaaataataagatcagtcccccaaaaaattaaaaataaagtacaatattttagagagacccacacaagagataatacatgcaggttgagtatcctgtatctgaaatgcttgggaccagagtgttttggattttggatctttctggattttgaaatatcaatatatacattatatacttaccagttgagcatccctaatctgaaaacccaaaatccaaagtgctgcagtgtttccattaagcatcacatcagtgcttaaaaacttggatttggggcatttgagatttcagaattttggattagggacaagattaggaacaagaactctgcagctagactgcctacattcaaatcctaattctgccatttaccagctgtggagctttagacaagagtattagtttctctttgtcttaatttcctcacctatataatgagacatcaataataatagggttgttgtgtggagtggtggatgggttaataagcataaaggacttagaatagtgcagggacatcagtattagctaatgctatgtatatgacaataatagagtggtgaatcattgatataggccatatgctttgaattgtgtttcaaataatgatgatgaatatatgctactacatacatattggatgagaatatttgaatggcatgcatgacttgccaaggttgaagtgtaattttggggtgtaaaacaaaaaccaaactaacttattgatgtgaggatgaaaactgtcaaactagttctttgacaaaatcttgtctgcatgtattttatttaacataaattgaatagccattacttagacattataaaatatatatacgataaaaattcagagtatagattctcaggtagcatattacaacctcgtacgatgactactattatggctattgtattatttttaaaacaaggaaggaagttctttttatttaaaatcaactgggatgttgtgtttaaaggaaacttatagactgaagctcctttttttctctccatttatttattctttcagttgttcagtcaacaaatatttatcacacatgtgctatatgtcaaacactctacaagtgaaagagtgtacaggagtgaataaagcagacatactcccagccacttgaagggagttcagcccagagcaaaatgaaaactcagatagttaacagtaatatgagaggccagcatttacaagataggtatagtagggactgtgcctcactggggagtacaggctcagactcactaagacatttggactcaaatgttcttgaaacactggcccagccaaagaaaatgtggcactcattatgattagtatgggttatagaaggcatctggtaacatatttgctggtaatcatagatttttttcatttatccatgtaggaaaaaatgagttaaaataaatgaggaagtcactgtttctacagtaactgaagatataaacatttcaaggttttgtttgtttgtttgtttgtttgtttgcttgcttgcttttgagacggagtctcgctctgtcgcccaggctggagtgcagtggtgcaatctcggctcactgaagcctcctcctcccaggttcaagcgattctcctgcctcagcctcccaagtagctgggattacaagctcccaccaccaaacctggctaatttttttgtatttttagtagagacagggtttcactatgttggccaggctcgtcttgaactcctgaccttgtgatctacccacctcagcctcccaaagtgctgggattacaggcgtgagccaccacgcccagcccatttcagggtttttatgctaatctgtgtaatgtgtatttcctttggcagagcttttccttttgtgcctcacatgtgctcctctaattttatatagtgttaagtaaataatacaggtaaacagacggagcctaaataaattaggcaatgtgactacaaactgtagttttgcaagcatgtagttcttcatgctgtgaacagttgaatccatgagctcttaaaagataggtagcttttcttccaattttactatattctatgctttagcaatttgttctttctattctgtcaccctagcatgataggaaaatgttagcaaattaaagcctcttgatatgttaataaattactcgtgcattgttcccatgcttcattgaatttcttaataggagcttcttacaaatgagctagaaacctgagactatcctgtataaaatccatcaataaacaagattttaatgtatgaaaatatatctttttatatgcctaatgggaaaatgacatttgaagtataataatataattggaaggaaaaactactatagtgcaatattatcacaatgaagagatgtccactaagaagcacatgaagttcttgtagttataatcaataccgcaaatgaaaattttaatggagagtttcttactcttcagaagctcaaggaaaaattgaaatacttgaatgatatgaccaagaacattctaaaagatctctaacaacaaaagtagttgtttctaaacaaacactgggactcctgatcccagtaataattcttagcagtgaataattctagaatttgtttcaataaacatgtggtaccccaaatactttttatattccttactatatgaaagaattaagaaactatgaaatgtacaatgccaaaaaaataaatatttattttctttctttataccaccacattacacaggcttcatgaaattctgtgttgtatcagttgggaaacttctgaatgaaagtttcagaaaacacagctgaaagtggcttgaacaatagtgggaattgggagaaaaagtcaagaggttgtaactggaacatgaaaagaatgtaggcttcgctcaaatatttgtttctgtgtcacatattgtgcaaatttaagatgttttctaaattctctgaacttgttttctcatctttaaaatgaacacaatcatacttacataatagggttgttgaaagattttaacaccgtaaagtagttaaggcacctagtataatgcctgacacagaagtggcattcagtgagtggcagtgacaaagcaaatttccataattgtcatttgagagttcactatctttggtatgattgacaaaaacctactgaaggttatttgattcctctgatttattttttattctagtaagattaaaaattaatgccatttaataaaatattttaattcaataaataattctgttttatcatctatttgagttatcaaattatcaaaactgtaacatcaaaacactaaggttatattaaatgtttattagaactttaggtgcacatttatttagactgaaatattttatatttataatattcttacttgttctttggcccacttaattgaacattcgaagagcacaggagcaaaaaaaaagttctttatcagtaagattttttagacctctcatttgattagacatcacaggttcaagttttatttattatgtgtacaggttaggggctatgtttattgtttgacatgagggtcaacagatgaaacaatctgcctttgacctatcttttcaacaccaaccaacagtaggtttagagatttcctccccaccccatttatataggtattccttatggagatgtaaccttatggtgaaatctatcttacaacatgatatatgctagggcttcagttatttacatatactcatatgaactcgactcttaaattacagtggttacatgactttgatgtgaagcacagtctctgctcattaaagtgtaaatagaattttcctatttcccagtcatgccctctgataagtgaaatagtttcatcacaaaaccaagtcctactaatattgacatgaacataagacatcacatacacacacccattcatcgagtggaaaaaatatattttgttaacacaggagttgtttgactgacagatgatgataagcataaccattttcccaaattattatgccacttaataaaaggaagtgataatgccttgaggctttgaaatgtgataatgcaaatggatgcactgaagtgtgaatactcttcaaccatccaccctcaatacttccaaatgtctatctaccacacagaaaagagtttatattggtaaggtggggaatgcatgactcagcaatctagagcaagttgggtttgttgttgttgttgttgttgttgttgttgttgtttttgagatggagtctccctctgtcacccaggctggagtgcagtggcatgatcttggctcactacaatctcaactagagcaagtttctgtggttattttatctttctttttcactgtaagttaacaacatctaaaatgaaattaattccatttacttgatcataatctacctaatgcttaattttaaacaacaaaatatgaagtatgggcaaaactactaggtgtgttagtggtaggatgatacaaaactaaaagataaaagtgtaaatgtgtaaatataattatataccatctgccaaataaccctgctgccaaatttgaaataacttgtttcaatgtatgttgaatgctgccttaacatataatccacactatgttgaaaattgttttcattagacttgctaatatggcagtgctgagggacaaggtattgactggcagtgtttggatactgttttaaactcatgagatattcatttatttaaattaatacttttattcattcactcattctttcattacacaagcatttattgccaacctactctgtgccagacactggagatacaaaggcaataagacttagttcatacctttaagaagttacagtcattgtttacccagtgacatattaagctgttctccttctaattgaaaaaatggaagaaccaagaaaagtgcaactaaaaaggtagacttcacagacactggtaaccagaaacagtgaagtgtttttgtgtttgtttgtttatatctccagtgttgcttgttggagacataatagggtgacagggagctttatagatttatacagaacttccaaagcagtcctaggctctgtttgcttatactaaatgtctctttatcctcttttcttgttccttcccacttagccagctgaatcaccctttcagaaaaagagagggaaaaaaatcctatagagcctgttttgctttgaaaattttaggctgttaaagaagaaactgaaaacagcaggaacactgtttagtgtatgctcttagaagaatcctacctatggaaaggaaaagagagcctgctttatgcactttaatttcaccagccacatgtcacctctgtgtctaaaccacagcattatcatgcaaaactaggccaaattcagtctcctttaacctttctttccagctgaaacaaaatattaagcagttagaagtgatcttgaaactaatttgtagccccatcattatccttctacttaatacctggaaaacttctagaactaacacatgaagatttaagatgctctactgtttgtaggtgaaagtatttacttttcactaagatatataaaactaactttcttaggaactatcttgggataatgataataataatagccaatattttgcatgtgtttattatatgccaggcattgtgctaagcatcttacatggattttcttgctttaccctcacaacgctatgatgagttgcactggttatatagattgcattttcttccattcgttacctattatttctccataatacataggtaggatattctttaaaaaaaaaaaaaaagctagtgattaatttctcttctagatgccctctaccttttctaagtgccctggcagtttttatacactatcaaaaaaaaagaaaaacaaaagaaaaaaaacaaggaaagaaaaagaaaaaagaaaaactctccctattatccagtaagaatgagttcttttaaaatatcctgcacaatgctcagtcatgtcagatatgaggagaggagtcaaaagaaatgcggtcagtgagccattccacacctccaaagttttcagtcctatgtgggactagcattcctgtgaaagtgcctaaagctggatgtggtggctcacgtctgtaatcctagcactttggaaggcagagtcaggaggattgcttgaggccaggagtttgagaccaacctgagcaacatagccaaaccctgtctctacaaaaaattaaattaaaaaaataaagtgccaatagatttttttttttttttgagtttcgctcttgttgcccaggctgaagtgcaatggtgcaatcttggctccctgcaacctccgcctccagggctcaagcaattctcctgcctcagcctccccagtagctgggattaaaggcgtgcaccaccacgcctggctaatttttgtatttttagtaaagatggggtttcaccatgtgggccaggctgctctcaaactcctgatccacccgcctcggcctctcaaagtgtggggattatcggcgtgagccaccatgcggccaagtgctaatagattttgctaatcaaattgcaactttagatcaaagatgatctttcttcataatatactcaattccaccctatgaaaaactataaaaagaaacacatttaattaatagaaaaatgtaatcttaacacttctctttattatcgtttcatgacttcaggttctgttccttaataatgtatttgaaaattgtgtactgatttgctgaagttcatctgatgacaaaaggccatattaagccaattaacagtataaaattgcaaagggaatgtttaatccacacttacaagaacgtaattttaacatattttagagaaacaaattttcaagtcatttaaagcattcttatttagaacaacccaaaacataggaaagacttggattgattggaaaggttttgtttgtttttgtactctattttaattgattttgactttactatgaaaatttttaagcaaagaaaaagtaccaattcctaataacaatacccattaaccaatacctacatgttataattattgacagtttagcttttattggtttactgaagtatttttaaataaattaaatatatcatactttacccctaaatatttcagtgtgaaaaatagtattttcccatataatcagatcaccatgattatatctaacaaaacttatgacagttccctaatattatctaacactgtgcctataatcaaggttttctaattatctcccatgtgtcttaaaaattgttttgcttaagccaggattcagtcagcgaccacacagtacatctgattcttctgtcttatctgtctaaaggttagaatagctcccagccaccctaacacccccaccttttttttcatgatattgactcatttaagagagcatgccagttatcttatagaacataacaataacagccaatattttgcatgtatttattatatgccaatgctaggcttctgaatttgtctttttgttcctcgtgttgtcatttaactcgctgtaactagtaaggttttgatgtacgctgattcaaatatcaatgaagattgataatagaagttttttgttttgttttggtttggttttttttttttgagacgttgtctcactttgtcacccaggctggagtgcggtggtgcaatcttggctcactacaacttccgcctccgagattcaggcaattctcctgcctcagcctcccaagtagctgagattacatgtgcccacctccatgcttggataatttttgtatttttagtagagatggggtttcatcatgttggccagactgatcttgacctcctggcctcaaagagatctacccaccttggtctcccaaagtgctgggattacaggcatgagccactgccctggccaataatagaaatttatatttggaaatatttggtcaataacactagccaaaatataaagttactatagttaatttaaatttatcaaagttaaaatgttcacatgtgaaatatatttctgggtcatataattctaaaagccgactaaaattatctctatgagataaaccaaattcatgattaaacagcaaaaaaagagtatacagggaagactaaagtctccacattctcactgcccagagacaactgttgatatactgtcatatatattcttcaaaaaataaattatacaaagtagaattacttgatcaaaactatatgattttttaaatgttaccaattttccccacaagaaatttatactgatttatttgccaatagcattatgagatatcatgttttccaatactgagtattataaaacttaataatttttgacaatctagttaataaaaatagtttttgtttgacattttaacaattgtgagtgtacttacgacttttgattacatatagtagaaagtcaacttatactggctttaatttaaaataaaaatttgattagcccatataactgagaaatccagggatgggtcagttcaggaaaactggatccaagtgcccaccagaattatcaggatccacacctctgttacttttctacattggcttcattctcaaacaggcttccctgtgttacagtaatgatgtctttgtaaccccgctagaaaaagagagcttttcccagatagttgcagcaaagtttcatccgatcaagttgaattacctgtccatttctgctgcagtcatagtgccaatgtggataaaatattatgattgacaggtctagatcccatgcccacccagggagtcaggtagcgaggtcagctcacctgcaccaggtagaccaagagtggggaaggaatggttcacaaaggttgaaggcataatgaatgctaaacagaaaaaaagaatatatatccattacattgtaggaactggtactattttttcttatatatattggaaattggcatttattattctgtgaattgcctattcatcatatcatttcctcatttatttaattagattgttcattagcttcttattgatttgtaagagcacatttttaaggaaactagctcttatgtgctatgaatatttttcactttgttatgtctttcgatttttgcataaaatttttttctaaaatttccacatggaaattttatataatattatataattgggtcaatcagtcttcattcatttagcatttattgctcgcttaaaaaggttcaggtactgtaggtgtgagaataaagagatgaataaaagacagggagtttcttcgaagggctacactactgggttaaaaagatgagaaagttgcctattaccagatggtgtcatgtaaggctttacagatgcaatttgaaaaacctccaaaataatgagttgaagttccttagataaaaagggagcccgggaatttacttgagcacagaagtgtctgtaggtatgatttctatgttgtcataacagaattttcagaatgatgacaggtagttcatgactaaaaaacaaaaaaggtaagaactctcaaagcctcttctaaggattttcaagcccttgattacaaaagataacacgataacttagatatgttagcagttcaatgtcttaaaagtattgagataactaaaagctattgttagaagccagacaaatgagtcaaatatacccagcttcaagctgtatctagcacagagctgcagctggttctgtaaaacgtctagccactgactagcaacatgatcttcatttgacttttcttcagtgtactcatttgtaagagatttggtcaagtttacctgaatgtttccttccatttctgtggatctgtgaggaatgaggaattaagtaggaaattatgaaagaaaaaagtcacatcaagggccgggcatactggcttatacctgtaataccagcactttggggaggccaaggcagaaggatcacttgaggacaggagttcgagaccagcctgggtagcatagtgagattccatatctattgaaaaataaagtcacattaagatcagaatttcatatttagcaatgaaaaagcagtgcagtagtgtggaatgtggagacccaggtacctgtttcctcctcatgaaattaggttcgtattgaatgccttgctgacctcagatacttatgaaaatcagtctagaaaatggatgtgaagacaatatgttatacaaatatatagtatcatcagcagttgtaatagcagtagtgaactcttgaacattttatgtgtgcaggtttgagtattccttatccataatgcttgggaccagaagtgtttcagacttcagattgtttcagatttcagaatatttgcatatacacaatgagatagcttgggaacagatccaagcctaaacaaaaaattatttcatttcatatacaccatattccatatagcctacaggtcatcttaaacttttttttttttttaacaattttgtacatgaaatgaagtttgtgttaagtacgtatgtgtggaattttccacttatggtgtcatgttggcatgcaaaaggttttggaatttggagcattccagatgtcaaacttttggattagggatgctcaacctatgtaacagtagaatcctagtaccatgaacatcattaccattttcagttttttatgatatattagaattcagtgttattgacattgctttaactaggcctctgatttgtccttgacaaacttttttttcttgaaaattataatgtagtttggtgacattgaccattcatcagatcaatccacatttatttatttgtatttgtttaaatcaataactctgtgctcagacttttatgttctctaaaagttcttctgatgtctcatataataccatttatccaatatgttttatttatataatttttgtggtcatttttacttactaaatttatatattttatacctgtcctaagaaaagggcttggtacaatatgcaggtttaaaagatagaaaaatattggtaaatcaaggctaagatgacagaaagaggaaacagcaaaatgaaactaaagaaaaagttagcatgcagaaatacacatcaaatacataccagaatgtttcaaggtacaatctaaggtattgcatctaaacagttgttttaaaaacaaaagaagtatgtatttcccattaaaaattttaaaaaataagcactggaataaacacatttaaacaattatatttactatagtatttatcagagccttaagatcacgtaaatccccacaaacatctggtaggatttttgtttcatgtaataaagtcacaaaggtttttatttttaggaaaaccaagctttttgtggcactgaagtttgagacagatttctctctttggtcttcaaaacagggaaactgagtgataagagtagagaaaattctcagcattatttcttcactaactacagtagtgtttcatgtgaacatcctaatgctacacatgtaatttcccgtagattttataaggaatgtgaatttttttacattagtcacttctttgattcttcaatattggaaacagtgcctttttgcaagctatgtaggctttttagcagttttaaaaactgaattataataataaagttttatagggatagaaattttatttttcatttttgcattttttgcaccattttttcctatttgttaaagtgttcacctgtaacataaaagctaaaaaagacaaaacagcaataaatctaaaaacaggctttaaactttcagttaaacttttgtatatggtaacacttaaaaagtgcggaagtcactgtatccaaatgcccactgtttgacagaaaaggacactatttattgatgtagtaactataatgaaaattgaaaaatattgcaaagtaaatttataaattttattaagtgtagccttaccttttgaccagaattcttaccatattcatctgccaaaatcagatgatattgacattgcagtatttgctaaaatttttgaagtatagcaaacttacaaccttgtcagtatgtaggtaagtaggtaattgattgatagatggataaatatgatatgataggtatctattaggatctcttaagcaaatgtcatctatgacaaaattcttatttccccaaacatttggaagctttttgctttctaattatttattgctgtttgactgttagaagcaaaatgatagaaaaatattaagtacaaagcaaatcacttgcattatgtttcataaaagtaatttctaaccttattaggtaaaaattcaaaattagaaatacattttaagaagttactaatggaggcatatacagactttaatactgtgcaactgtttcctacaaagcattactctgtaaaacactgcaataacatgactttgatgaaacttgtgtaaaataaaaaatataagtatttacttttccttttccagaagtgtaagagaagattgaaaaagattagaggaagagacatgctcctttttaaagaatgttttgtgagattttacaggacaaacagtatcagttaagatcaaaccttagggattgcacagacattttatgcacgtgagaggtctattagcatattcacgacagaacaaagtattaaacattttcagtgctttgaaaaatatactcagtaatgggatggctgggtcaaatggtatttccagttctagatccttgaggaatcgccacactgacttccacaatggttgaactagtttacagtcccaccaacagtgtaaaagtgttcctatttctccacatcctctccagcacctgttgtttcctgactttttaatgattgccattctaactggtgtgagatggtatctcattgcggttttgatttgcatttctctgatggccagtgatgatgagcattttttcatgtgttttttggctgcataaatgtcttcttttgagaagtgtctgttcatgtccttcgcccactttttgatggtgttgtttgtttttttcttgtaaatttgtttgagttcattgtagattctggatattagccctttgtcagatgagtaggttgcggagccataaaaaatgatgagttcatgtcctttgtagggacatggatgaaattggaaatcatcattctcagtaaactatcgcaaggagaaaaaaccaaacaccacatattctcactcataggtgggaattgaacaatgagaacacatggacacaggaaggggaacatcacactctggggactgttgtggggtggggggaggggggagggatagcatcgggagatatacctaatgctagatgatgagttagtgggtgcagcgcaccagcatggcacatgtatacatatgtaactaacctgcacaatgtgcacatgtaccctaaaacttaaagtataattaaaaaaaaaaaaaaagaaaagaaaaaaaaagaaaaatatactgagttagaaaaacatatctgaacatctagtaaagtataaaatatgtgggtaattttaaatgaaaaactcattactttcggccaggcatggtggctcacgcctattatcccagcactttgggaggcccaggcgggcgaatcatgaggtcaggagattgagaccatcctggataacacagtgaaaccccatctctactaaaaatacaaaaaattagctgggcatggtggcgggcgcctgtagtcgcagctactcgggaggctgaggcaggagaatggcgtgaacccaggaggcggagcttgcagcgagcccagatcgcgccactgcactccagcctaggcaacagtgcgagactccatctcaaaaaaataaacaaataaataaaataaaaaaataaaaaactcattacttcaattccgtaacagaccttacattcatttcactttatagcaattacttttaccaataatgtaattatgttgttttaaatattaagattttatgtaatgtttaacaaaattacattcccttttttacatctatctaaagagatttgagagataatgaaatttaacacaataaaatttaaaccttagaactttttaaaaaatctaaatttttatactgtcatactttgttttacaaaatgaggacaaaaaagtttaggaaccttaaaatattaacacttttgtgcgtgaaaaatacagcttttatataaattgttgagtctttgttaatcataattaaagttaacaaaaaatgaacataatttacaagtaatttaaatattcaggataagcacccttgcaaataagagtttattatggaaattctaacagactttttactgctgatgacctcattgtgttatttgaattagtctcctgaggccaaaagaaaaggctcataacaatttataaatgaatcttcctctcttgtgtaacattatgtgtccctttgaaacactaattttctactacttctcttgttaaaattaagccttcgagggatcttcatagttaattataaatattaaattttgaaataaagtagacattgtacttagtactcttgttttctctgtaaacatacttaatttatagtatgcaacttaaatcaaaataatgtgcttatttgataccataagcacggactctgtataccattaatccaaaatcagacaaaaactgaagctaaggcagtttgctatttgaaatcatgaagatggtatgctggaaattcctaatgattagatgtgctaaaattttgagactgtgatgcaattaagcacatgctttttgaagaaatcagtatagggattagcatcataatcagtaaatagggtggtggtactgataggagaggtcttagtggcctcagcaaaatgctttccaaggaatccgaatttcctggattattccatcacccttaggtgtgtagtttaacagtaaaaaggatagttgttccatctatatactaacagaatgagactaacattctatcaggcttccatatggagggttgtctttcacactctgggtaactggctgttaagacaaggttttcactaatatggttgtcaaatggtcaatctcttcaccttccctccattgggtttcctgtattccaagctaaattttcattatgtagcttattaagtagaaggaaaataacgaaactgttggtgtggccttaacagtttaaactagatcacctctgataatctagttaacaaaaacttggtaaagtctagatactttgtactatgaattatcctcttgggcagtttataacaagtgtaatgatttgtaattaatatcaaaatccagtatggttaaaaatgtaatacaaaataatgtatttatgctgtatggctaaaatgaattaacagtgaaatactgaaagtataaagatttattatctaggatatctaatatgactgtattaaacaaaatattttttttcttttaatagccaattggtgctttgaaccccaagagagctgtgttttatgcagagcgttatgagacatgggaagatgatcaaagcccaccctaccattataatacccattattcaacagcaacatctactttatcctggcttgttcgaattgtgagtatcttcattgagttagcttgcctttggtaccttaaaattttaacataagtaaattaaataaaaatcaaatcagttgtaatttgattaacaaagattagagacgagtgaagtagaaattaaagatttcaaagtagcaaaatatgaattttttttattgagttgtctcatttgcaaaattggattaggaagatagttatctgttgctaggtattatgagcttaaaccaaaccagttgtccagttataaaggagccaaaattgagtacatacctttttttttttttttttcagtgagagggtctctcactctgccactgaggctagagttgcagtagcactatcatagctcacagcagccttgaacccctgggctcaaaggatcttcctgcctcagcctcccgagtaactagaactacaggcatgtaacaccttgcgcatctattatttttttatttctcttctttttttttttttgagacagagtctcgctctgttgcccaggctggagtgcaatggcatgacctcggcttactgcaatctccgcctcccaggttcaagtgattctcctccctcagcctccagagtagttgggattacagatgcccaccaccacgcccagctaatttttgtatttttagtagagacagcgtttcaccatgttggccaggctggtcttgaactcctgacctcaggtgatccacctgtcttggcctcccaaagtactgggattacaggcgtgagccaccacgcccggcccagctattatttttaaacatgggatctcactttgttccccacgctggtctctcacttttgttctcctgggctcaggtgatcctcctgccttacctccctaagcactgggattacaggtgtgagccaccacacctagccctggagtgcattcttaatacccactgcctcctttctcacaaatgaggcacactggcacttgctctccccccctccctcattctttcttcttgggcagcatgttttaaaaccagtttccaaatgttttgaaaacctctttctgttacttttctctttctcctaggacataaatatatttaagtctcactgaccttaaaaaaaaaaagcctcctgccagcctccgcccactctgaagttctttcccatctctctccctgcacagtcagattcctgaaagcacaacctctgctgtcctgcagtgcactgtggtacctgttgcctctactttatcacctcccattcagtctttagcctggttgatttcagttccacatccatcactttactgaactgttttggggaggtcacatattatgcagatagagcatcccattttttacctatcatgtctcttgaagcatttcacgctattgctaatctctccttgaaattttctttcaagttccttttacaataccctctcctggtttgcctcctgtcatcctaactgttctgctcagtctcctgttcagattgtttttccttaatgttcctcttctacaggatttttctttatatttcagctgagctgtgtcattcagttacaagctagtgatttccagcttctctcttctttgcaaacatttctcatgggttcctgacccatatttccaagtgcctactagatatttctacctgaacatctcacagtaccataagcagcatttcaataaatgaactcctcatctccctcatgtacctgctgtggttaaatgccgtgattattcactcagctgcccaatctagaaattgggaagctttttcctagatattttctctgtctttccaacctcttacatccagtcagacatccacagattctaccaactaaatatctctatctccttttctgtatactgtggcactttctttaatttagattcccattctctctcgcctagagtattgccaaagctcttaacaaacctcttttcctttattcttgccttctccattctggtctagataggagcactataagtgactgaggagtattgtagaatgctaaattaaatctcttaatcaataatttttccccttattaagatatacctcagaccactctattgtatggggctgatgtgtccaagaaacacattggtaaagcagagtatatgaaactgcatctcctgtcttcgaaaatattttttcccttcacctaaatgacagctctagtttgtaggtcttccttaggcattctctccattatggggaaaaaattaactttctacagaaatttagtatgaatacattttaagtaacttggaaaccactgataggtgacaaactacaattatttttgttaagaaaaatgttgtcagaattatgattctgtttgagcacagattttatccctttcataattctacaccagcataagaagttaaggaagtctggactaactagtcttttgagaaaacaaacccaaatcttacttttaaaaatgaactctgtaatgataaactaaaggaaaagacataaaactatttttagaccaaagttattaaatcagtctagtttatccaaacattcaccttaattctgtgaacttggattcttttataaaaaatgtttctgagttagaagtttcttgagaaatactttttaaatccggcacttttaaagtatagatgttctcttttttattttctgttaattttgagaatattagatttatgtcattgcctatttatctctataaagcaatcagaacagagcatctttagtttctgggtgataataataattccagaagtaggaaaatacttcacactcacaagaggcaaatgcttttcaaattccagatacatggacacataaagagcttataacttccaacctgcagtttcagccacaagtcaaaactaaacaaagtcacaaaaatttaccagtcaagatctcaaaagagctggctttctttataatagatataaaatatgctcttaattgatttgaactctcaaatagtcagacaagaatacaaaaaaactaattaattggattcgctgatcaccaaatgatcagaccataaaaccaaaactacattctcaatcattactgccgccagtggaaaattacctattagctgtgcggaaaccagaaacaaacaaaaaaatcagtagaaggagtaaattttaaaacctagaaaaaaaaagtcactggagttcaaattctgtttgctgcctagggtccaccctggaagctaagaaaagatgtacctgggcttaagtagcccatgagatatatttcttaagctacacagtcaatttgagttcatcaggttagtccacatggaactctcaaggggaccaccaaaactgttagcaaaggaaatttttggaaaacactgaaactagagattttcaccctgggaggccttttcataccacctcaggtcccgtcaatgacaatcattgccttagtgagccaccaccatggagggagcaggacacctcttgcaggtactttggggatgaggaaaaaggtcaggagtccttcctgagaaaatgttatcaactgggttgtttggagaattaaatgagagtatatatatgatagtattttgaaatacataaagtggtattcactgtttttttacctaatcaagttagtctgaagccagatttacaagacttcttcaagtgtgactccataagaatacttgttatgaacagcctaagttaacctcatctatccctaatcagctaaacactttctcaaatcataactcagaatttattcttaagtagatttattattccagcgaaatggaattcaaacttgaatctatgcaagggtatgccagaatattctgcacatttatcctacacatgcccttgtctatagcagtgctgcacaacagaaatataatgtaaactaccatgtgacttaaaatttctagtagccacatttataagtaaaaaaagaaacaggtaaaattaattttaataaatatatttgttaatctactatttccaaaatgttatcatttaaacatgtaaccaatataaaaatgtaaaataaggcattttacattttacatttttggagggagggtactgagtctttgaaattcagagtgtattttatatttacagtgcatctcaatttgaactagccacacttcaagtgctcaatagtgacatgtggctagtggctactgttttggacagatctataaaactgcttttttggagactcagcccaaatatcttatgtcacgtggttataaataaaagtatcagtctaatggtttactaagtatttatccttatggtccagggaattgtaatgtcctcactcccattccaaggagtttatgaaatagaaaatgcattaaaatttgggtcactaagaatttgttcacaaaaataaaatacacattaaaataagtgtctgtcctttaccttagaccttttagacctagtcattaaacttgttatttgtttcaatgtacttagtataacaacaataataattgcttaaaaatgctaattaactacatacttcattactttaaattaaaaatattattttaaacaaactaccagtgaaatcacttgtctacaatatgagaccctgaaaagactgttttcctgacagctgccattgggcaaatcatgaataaacttatagcagtgtttggagtttcttcagatattaatattaaaagacacattttacttggaatgtttttactttacaacttaccctagacatataacatgtatacagaagtaattaaatctttttccctggcttgctgaccactcagtaactcgttcaccttccaaattcagtatattcaaccctcctattcaaaactcattcgtcaaacatttcataatttccaaggaagtgatgtttagaatttgacactttctgtgtaaattatggcttgttttgaaagcttaccctaaagcctctttaaaccataatgtgtctttaaaagtatatatgtatagtagaaacatttttgcaagtgttgtaactaaaaccaaaagatagtgctactgaataaaatattgttgtttatcttgaatactgaggcattaaggacaatgcatatttactcagaggaagatgagaaatacttaaccaagagcctagtgcatggtaggtacataggttaattagtgaaaacttttggaagattctaaaagatacttcttggctcttggaagagaaataggagaaaataaacttctggaattagacaaaggccattagaaataatggttcctccatttgttagaatgtgaccttgaattttctcagatataaaaggggaataattacacctactctgaagggcgatagtagggattcagttaacttagataatacagagcctggcacagaaaaatgctttgtagctgttatttcccttccctttgtattttattatgcttccaatcacttcaaatatacatcttttctttgctatagttatgtcccaggcactacctattacccataaacgagatttgttttggcttttaaatggaatgaagagaaggaaaagaagaacagaacagaactacaagaagcgaaggatgtaaaagattattatgagatgactaagcgaaaatcgtgtaagacagaagaatgaagaagttgagtaaagagaagaggcaacagggaaacggcattagatgcccacgatggaattagttgatctgtaatcatccaaaagcaagaaaggctgttagtgtcttcagaggggactaaggggtatgatagaatacagaaggacaggtactttccagtgcaggcaaggtgagttttccatcactgaaaaagggttggaagatatgaaatgatgttggagtggatgtaattaggagaagaaagtctgccattggccatttatattgcaggacctaacctgaactttgtaaagactaacgagttccagaattgtaattcctgaaattaccgtttaatatgtattcatttatacatcttatctcccatgcctaaaacttttctaatataatggtgaaatgtccaatctgttgatgtacacatggaaaatggcccaattgacaggtagtaggcaaataaatataaaagttttttaaggttaatatagcacctaatcctctatgttagtcagacatgagtcaaatgaaaaagaaaggctctgcattgtggcttgaaggtaaaagggaaacacatggaaaaagcaatctccacagtaatcagagcttgaaagatcaatacttacttataaacaaataggttatcaatttctattagtactctaccactgtagcaactggaggccttcaggtataatgagaatatatgtcagtaatgtaatatgtgaccttaagacagttgttaatcagatctttttaaaagctatttaaaacactgaaatgtggaattcaatattctctgcttttaggtgccaccagattcattcataactttgttaccggaaataaatataattctttaatttcagatttcttttcactaagcccatctgtgctattcttggcatgtctttgttaagagttgaaaactagacaggattttgtaatttaggttgaggtggagatcagcttttagcggctgatgataagaagtacggctttgcatgtataaatgggttttcactcacatctgtttaataggttaaaaaacctagagacaagcctgatccctctaaattaatctctgcccactacctacagtgaaaattaaatgccttacatcagcatcctgcaataataaagtgggttctgaagataaaactttttggtcaaacctactagtagttaagaactgaaaagaaaacccgtatcttactctcacccaccatactcccatctcccaacaataccttgtatgtttaggtgtatttaacacacatttgttaaacattgttagccatgtgctgtgcttggggctggggatagagagataaataaggccttaggaactggcagtctggtgggaagtccaacagtgaatacttggtacagtgcgtaaagctggtagtcattttcataactctgtgccaggtaagatacatcaagctttctctatgttatttcatttaatcttatttaatcccataattcccccaaggtattgtcattcccagtttacatagatgaaggaatggagacagttgcttgacacagttacttaaggttaagtaagcttgcccaagatagagaaatagttccaccaagattcaaacttaaatctgtcatattgcattcagtttaccattgctgcatctacaatttttatatccccattttatttaatataatttagtgacagatatgttattttcactaccttatttttaatagtgaattaaacatctaaaaagcaaataaattagtgaaagacatgtcatataatttttttctaacttaatttcactaacatttatttatttctcatatcacttaaaatcctaaacagcaatatggacttcttggatgcatatctgattttcaggtgaatcaatactgtcccccttacttgtatattgttttttcattgttgatcttatctctttcatcacccttttctctcatccaacactgaacatgaaatagtggcaacatattacaagtttacaaaattgatgacatctggccatactaaatttcagggagatattgaggaagatcagtatttgttgcttttactccaacagccagcccttaaggttagtggcaagaaagggagtttaagggggcaaagtatgtcccctttgtacatacatacaaaggaattgtaaagcatacaaaggaatgaacagagattacatattaaagaaagaggactaaaatattttggaaaatgtcatgtaggtttcttagcattattgaacctgggaatgacatgtcattcatcctagacttgagagagaagaattgaagcagggaaagggaaatatgtatctatctttgctataattgtagttaagaaatccttagcagaaatgaatgttatttaatccttttaaacttggaagcaaatttaatgacatcaaaaacataagaacaacctaagaactcccagtgtgagaactcccaacttaagaattacaggtaaagcattaaaattaaatgcattaggacattgcaataaagttattcctaggttttctgctataggaacatgtactggatggcagacactatgttatccaaagacaatagtcacagaatgcaaaaaggtctagttcatctactgtcatttgtacttactttattcttcgttcaacagattatatattgagcaacttctatgtaccaggagttgttctaagtgttggagataaaacaatgaataaggtagatacggaacctactcatagtggggaatatagacagattaacaatcaattaaaaccagtgtgataaatgtttcagtgctgtttgaggaaacacagattgctatttgagcatactggagagccgtggtagcgcaaggaaagtttttcaggagaaaatgacatcatggctgagtcttaaaggataaaaagaacttagtcaggtcagaatagtgaaataaatgggtaagtttatacccggcctagggaacatcacagacaaaggacaagaggtgagagtagtgtggcaagattttagagtgtgaagaggggaatggtgagagataagagttaagcaggttccagatcattcagcctcttgtaaaacaaattaggtagtttagactctctcctaatcactcccaagagctattgaaggtttttaagcagggatttgcattttaaaaacattatcagaccataaggtagtactaatactttcgtagtctttcacaggtaatcatggacattctctacctaattccacactgcagtgatcagtatcagagtgatttttgtgatcagtatcagagtgatttttgtgatcagtatcagagtgatttttcttattgcaatgttagtgtatatatagccttaattattcgaaagaaaaatccaacttatgaattgtcattaatgcaaaattatttatcagaaaatcgtagagcactggaaccccatcatttcacagatgagaagaccagaagcaaaatgacctgccagagttgcagactgacaactgctgccttggcctagtcaagcccagacaggcatctcctactgccttaatttgggggcatctttctaggaccctgatctgcctccacatcttgaaggattttcaagatagccatgtttcacaaaggaacgagggcagctgtgtttagagtggtcaaatttctgattctgtttttttgcttaggaacctttcacaaccttcttcctcaatgcaaatgatggaaaatttgatcatccagatcgaaccttctcatccgttgcaaggtcttggagaactagtcagagagatacttctgatgtaaaggtaggctcttttatttgttgatattcattaaatttcaaaatatgtggaaattttgatttttttaagtgggtatgtataagacattttatattgcagctttgttccatcatattaaaattatatggtacatctaaccttataggaaataattttgaacattatagaaaataactgaaaattctttcatattacccagtgaaggtgttttcgttatttcaaaaaattcctacctaatttagatcaaataatcaggagatgtgaaaagcctataaaatgcctttcctgctgttaactcaatatttggtccattccataaaacacagcaggaattggatttgaccttaatgtgtcatattgttatagcttgcctggcttggggtttgcgtagcctggggcaattaataaagcattaatgacaagacccatttaaaatgtaggcttttccgtatagccttagcttttacttgactgtgcctggggatactatgcaacaatacacattagattaaaccaacacacacacaatatccagaaacagccagagagcagagtaattttacagttggtactgcttaactattgttaaatacaaggatttgttattcatttatatgggctcctattttaaaaaagaaaaacattgtattcaaagcaataatatatatttgttctctcatttgtctcattttttttcctgataataaggttacatggccaggttattgcataggtaaatgtgtttcttattttaagctcattttcttcaaggcacatttttttcccattactgtcactcagtacaaaaatgttacggtatcattccatttagagccttaaaccaacaaaagttagtgagttaaaatcaaaattgtcattcacatatttatgcttctctattgcaaaacatttgtaaaaggcaatttcagtgttactgaactgtaattggatgaatacaagttttgttcagtatttttccaaagcagaaaataaaggaaatggagccaagtagattgtaacatatctgtgtgttttacttgttgttgtcaaactttacataaatgaatatttattcatacaacatatttacatttgtaaaaaaaataagagaatttaatatgcatccttactatattaagctttgaagttctaacggtcttacaactttgctgagacttaaactctaaaatatccataagccatcatttaaaatgatttgttaccagtgaagtcaaggagggagtctgtttcttatataataacactttgagaattaatacagaaaatgggagtccataggctcccattgaacagtagtatccagaattcacacaatgttcataaaaggcactcaaatattttgtatgtgaattaaatattcttatctgtaattgaaggcttcttatcgcagttaagattattgatattttaaatcagagctatatccatattatatcagcctatttcaaatgaaaatgcctgctcactgttgtttgacatcatcacacacacacacacacacacacacacacacacacacacacacaaattggcttttcaacttaattcagagatccaccctcacatatttgggggtcagtcattctaatttttatatacagttttagatttcacttcctagcctgagaatttcactgatgctttataccaccagtctctgataaccgatgccctgtaccgggctttttcctctaaattctcccagaaattttcctcttcaaaaccctttcagaaacatttacattttattactaattgtatttggggggctcctgggttcacatcatccaggacaaagaccaatgtggatatcactaacttgggagtttttttgttttttatcctcaagcagctgtactgaacacaaacatgcagctttttttttccccaaagacttaattagttcataagaagctcatttccccaggatgacattacacagattgctctcattttcagctctcttaccaccactcatgaacctttcatattatatgttaatacatcttagatatcttgccatgtagacttcccctttctttttaaaggcagcatgctacatatatacaataatttatatatgtgatctctggttgatggagaatctttctccctgattgttactatgaagcacaaggctgtagtgaacatctttgcacagacatcctgatggactccttctatatacataaaggctaattcttattaatgggactgatggctcaaagacaatatactttttttattttttaagatattgccaaaccatcatcctcaaagatgaaaattcactctctacagcagtgtgcaagggtacctccttccccgtgccccctacacccatcatcactattgtattaaacaatggaacttctgctagtctggcaagtgaaaaattaagttatgtttgttttagtttgcatttttttttgagtgacgtggaacatttttcatgtacttattgacctgtacactgactcctatctattgctcatttttcagttgggtcacatgtctttttcttactgatttgaaaaagatctttgaagttgcagaaggttccattgcaagtagggtttcttggtcgtcttagctttgttatggttcgtttaatgtgtgtgtgcgtgtgcgtgtgtgtgcatgtgtgtgtgtatgtgtgtgtgtgtccagtcaaatatatttatattcccctctatagcatcagaatttgaggtcctcatgaccagagtgttaaagagaagataagacttttgggtaataactagtgctaacttgagaatcttctgaattcatgattaaacctgatttatcagagaaaaatatgttgctacgagtagtaattgttttgctacttgtgtgttagaacctaaagtttttattcttatttctaagctgttaaagcacagcatgatatattttttaaggaagtgtgtttccatttccagagaagaaaagtatctctgcaatgtctactaacttagtcagttaatcacataggagagaactaggatgcagtagatggttttattctgtctgtctctattaatgtcagtctcttcctgtgctaatgaacgcaagctgggaagaaggagtgctgctgaagtgacctttcaggagagaggtctctggagttgagtcagactagttagtttttactttattattattttttaaatttctttccctctagcctagtcttggtaacaatgacattcaactcactgaagttcttacactaattttccttaatgccttcaaaagttgttatattacttttagaatagctatgtagatgtcagaaaaggtagctgtgacaaaatgtcattaaggtgacatagtgtaaattaatacagttaatggaggtgctcgccactgactcattgacccattatgagctcttgtggaattaatgaatgccagggcatcagtcttttgaaaaaaaaaaagaaagaaaagagatggcagctttaaaaccttgcaatgaattatattagaaaagtgaaaacgtctggatcggatttgatttcactaggaagccataaaatggtacgctctctcagcaaaatatattaaactgaaatgtcagatttgatgcaataggtatacaattatgatagtgttaatagtggtcttctatcattctaagacatactttcaggtccaatttctcagcagcttgaacttgtcataagcttataaattaggaatcgcatttgaggatatgttcttattttttgacagaatgtatataatactattaactataccgtggggttttagtgtagctgctaaaataaactagaaatcacatttatagacacaaaatgtctgctataatgttcattttgccatttctttaataatatttggtgttttcctgcactgtttttcatttaggaaattttaaactacttagactttttccttaaagagaagctgattaacagaaatttatcaatgggaagagagtcagcagaacagcagttatcttaagcatgcaatctagtgtctaatgtgcctctgtaggagtacacttacacattataaaaataagcccatcttttaaaataatactgaatagttttcaaacatgtttttgttggttgatacagtccttgaaacaatcctatgaggtagtagtcattaaccctattttgtaaaggaggttcatgaatattaagtgactcacctaagttcacacgcaggcaggtaaagaggaagccagtactagcacagagtctgtccagttatttaagatgcttcatatccaagaggattttaagaatgggagctgcaaggccacttcatgcctaggcccggaagtcacatcatgttacttccacagcgttgtattgctcaaagcaagtcatggggccctcccagaataaggaagagtagacacggactccacttcctgatgagatgagttgcaaagtcacatttcaagaggtcactgagggtggagggattactgtgcccaccttcggagacagtctaccacagtcctccgaatctggtcaaaattcacattcctcttacatgtaaaatatactcaacttgttccccacaagtcccatcccagtatttgtatcagactgaaaatctggtatcttgttgtctacataagccccaggtacagataaggcacagcaattcctaatttggagacctgggagctaaaaagacaaattatctgtcccatgtacacacaacatgtggtggtaagacagaacagttaaacttcggtagaaactccattcagaagggggagaatgtggaaggtacatagcagtcaatgttcatagcagttctgaaacgcagccaggaataagttgtcgattacccagactgcagggacagggactgtccatggattagggcccaggtctgttatctgggcttggctccttaattcattattttccatggctcttggttacttcctctgggacattggctttgccctctgaatcgttcttttgtttccagaagaaataaacatggtttgcagctgagtatctttctctgcatgcttcctgaccatagaaagttagggccaaagcctcatattcccaagttggtacagcagctttaaaactgtgtagcctttctgtgtatcaaattagaaaaagctaatactcacaaatccttttggaacaggattctctctttcaagctgtgaattaggatactgtttataatgccctaagaatccctttctcgtgaatcactctgtgtagctgagcaagtctgaaaaacactacctgaaattttaacttttataaaagggttttacagacacacccttgattttagctttattctatggccatattttacttgtagcaccttcgaattgatctccatcctgaacctatgtcttattttgagaatcttttgccaactgaagagagtgttctaggcccttctattgcttgaaatactgcttcaaaactgaacagtttcttcctgagttcatctctctcttgcatagcttatctcttttgcatagcttacaccattagatgaaaccattggtcactttcagcattctgcctggaaatcttctaagtcagaagcacatgcttattaggtacttgttctgtctttgaaattattgcagaagacgatgttaattttccaccactacttaagagggactgcttccaataacaacttccttgctgatcttccagaccccaccaggctcctcaccacccctcccacttctgcctgctgcctcatcgcaagccagaatcatgtgttaaattctttttattactttagcactccactttgaggattcagtttctgttttggtcatttatgactttgtaacaaatcaccccaaaacctataggcttaaaacaactatttattcatcgacaattatgcaatcagagttaaggctcaaaaaggacagctaacctctaagccacacagtgacagtggggcagcttgactgggcggcagaatctacagtggctttgctcacatgtcttgtgcctcatctgagatggctggaacagccaggaactgcctgggcatgtctgtctctatcacatgtttctatagcaagggagccactctattgcatgtggtaactggcttctaagaggactaaaacaaaagctgccaggcctcttaaactcttaggctgccctaagaagccttgcagtgtcaccttgtcacgttctgtgtgttgaaacaagccaggccatattcagacaagggggaaatagactccacctctttatgggaggagtaaactggagatgccaaagggcttgctcttgggatgggaggactgttatagccatctatgagaaaactctgtgagttaccaatttaaaaaatactttaagtactagtttggtttgtaccattctctacagtctgagtgtgcatttagacataaaccaaaatctcatgagcaagcaatttataaaatacatctgattagtttaggtaatatatgttagtccatatatatgtcaactttaaataaccatattcagaaaatatgattaagtgtaaagtttgtttgagctcaaagcttgagaatggtcaccccataacataggttcaagtagccctgaatatacactctgattagcagcaatcataaatgggtttttaagaaaaaaagaagaggcaggtcctaagttgcttaccaagaatttacattaaaataagataagccattggctatacattgttctttgtatcaccgatttcaggaactgaagataatgggtaaggcagctggtcagaaaccaaatgcctttttaaacagttgctccccaggcttgggttgaggaggcagcatgagtgactgatgtcccacacgcacgtctctctggacctgatgaatttttgcatgcctcacataactcagactgctgtgagctattcttttcctcatatttgctaaaaatacttgcatcatctgaactgtctacatagctattcattgaaacacaatccacagtgacagaacttttttactgaattacaggatgcactttggtactgggtaaactctagtctcagaagtaatatttttgatccgtgcccctaaaaaaaattgagaccaaatagcttctagaatatattttatataaagttatgaaatgtattgttttataaacattatttcatttaatcctcacatctaccctaagagttcattgctgacatcaccaccatgttacatatcaataaactttttgtcaaaaggttaagaaacctgcccaagctagcaagaagtctggattggactcagacctgtttgattctgatgtatgtaaggtagcatttccctggtagaagaagggacaatcccaatgctgctgcctgcccagcttccccctttatcttcaactcactggtagccatgaggttcctcttctttaagaaacacactttgagccgcgtacggtggttcatgcctgtaatcacagcacttggaaaggcagaggtggacagatcacttgagatcaagagttcgacactagcctggccaacatggcaaaaccccagctgtactaaaaatacaaaaattagtcagccatcatggcgcacacctgtaatcccagctactcgggatgctgaggctcaagaatcgcttgaacctgggaggcagaggttgtagtgagccgagatggcaccattgcactccagcctgggtgacagagcaaaactgcatctcaacaaaaaaaaaaaaaaagaaacacactttgaaaaccagggcctgcaaagtttttaatcaacatttcaatgcctgaaatttaggatatggtaaacatagtaatcttgattcatttttaatttcacaaatatttatggattacatattatatgttagcaccattcttagcaagatagacaaggtccctaccttttgggatttctattatgatgggacatgcaagcatacaacaataaatagagaaaataatcattgctatgcagaaaattaaaacagagtaacgtcatatagaatgactagatggtggccggatgttgtggctcatgcctgtaatcccagccctttgggaggctgaggtaggcagatcacgaggtcaagagttcaagaccagcctggccaatatggtgaaaccccatctctactaaaaatacaaaaattagccaggtgtggtggcacacgcctgtagtcccagctacttgggaggctgaggcagaagaatcgcttgaacctgggaggtgtaggttgcaatgagctgagatcatgccattggactccagcctgggtggcagagcaggactccatcgcaaaaaaaaaaaaaaaaaaaaaaaagaaaaaaaaaaagaatgactggattgttactttaaaaggcagaatacagaatataggagcaggaaacctggatttaaagtatctgggtttgatttttggccttactaccaatttgcagtgcagccattagcaaattacccacccaatctttacctcagtgttcatgtctataaagcgggaataatgagaacacctacttcacaaactttttgtgaagattaagaaaatatatgtaaagcacttagaacagtgccaagacatagaaaggtaccaaaataaatgttacctgctggtttaaaacagaatgaccacaggtaacatttaagttgattcctggccttggagcacaaatgtagtaattgccatcttcttgcacataaccagttaaatctcagagatgaaacgctcatattctttggtttatatttttgaaacaacaaatcttttcaataatggaattgtgaatataaattatactaatgtcttgtgtttacatacactaactttaaataaaacttgctatttgaaacaagattgtaaaacaataaaactgagaccaaaaaaaaatctcacctctgctgcttcagctacttctccctagacttcttgtgatttcacttcctctactatccccttcacaaaactccaaactatccccaactctggacttcgggttcagagagctttagtcactgatagctctggtgtttgaaacctctaggggctctgcaaacaagctgtgcttcagaagtttctttctatctgtgtttaaaacatgtctgtttagtgattgtttccattatgagaaatctgggagagtttctttgtcccttcaaacatcaagcctctaacagcttacatctacatcttagttaatgccctaatttatgaccacatttgggtggcctgataagaatggagccaaaaaaaccatccttacttagaagggtgtcctgaaggccctggtaacacgacttctttctatgactagccccagttagggcctccttgaatgatcctactggagtattcttcctcctgcccttctaaagaaccatcaagacagatctttctaggccttccttgttctttggtggaggccagctgttagtgcccttctttctagagtgcctaaatgaaaatgaaattagtcttctgccacttttgcagtttgagaacaattctgatggcaactttaaaatcaactttttctatatttaaattgagctattttatacttttgagccttttaaatgtaacttgaataagcaagataacattttttaaacagaaaagtttccccttaaaaggcagatttcatttcagggtttatatccttttccttttctttaataaagttcttcattcactctttccccatcttgaggcatttttctgaccatctgtgtattccccagatttctagtcttattaaaataacttcatccaatatctttaatagcttaatatttaatgagcacctgctgcgtgcaaagtatagcactgagagctacgaaggatccaacaaaacataaacctcacaaaataggctcaaaactttgcgtttgcccagattttattcatactaaaattgcattttccccaattttattcacattaataaatatgacatcctatgtttcttgcgcctttgtgaatctaatttaatgactttcagtgaaattgcattgtagtggtaagtaggttaataatgaccacatattttatacaggaaagaatgggaaataatatatgaaaaacattatagagtgccaagatggtataagataaattaagactattttagttgtttaaataaaactaaatatattttgctatgtacatgtagatatatacgttcctctctgccctcaaggaagcttctgtagcctcgttgtagagatagggcatgagcacaaataactgacgaaaggcagtaagggaaacacctgatttatgtgagtctagtacatataaatcacactcccaaccgagcagctgcacaagcttacgttccttcccactttggaccctttagggtgttattgctattgtgtcacatgaagaccaggtcatatgcaaatagcaatagtctttgccttctctgcgccttttactaattcctcatgttttcccaaagagtgagagtaagagcagaagaaactatatattttacattcatacattgaagtcataagataataatatgcatttctgattggatgccaatacatgagaacagcagtgattctttacttctactctcctgtcagcgatcaaaccaaactgctccttccgtgactgataaacactgtcatgtttgcccagcctggaaatcaaactcatgatagtcattgctgatagaatagtcactgctgaagtgccctttagcctgtcttatccttcaattaaactgtatgatttttggcaaatgaacatgtgttttctacagtatggtttttctttcagcctcttctccatttccccgttcatattggagtcattgaaaaattatattaatttgtattaattccactagaattctcttttcctttttcgttgtggccttgaggtcttgtacatagtttattgttgatacacatttggcccctagtgtgagccatctaattccctctctttagctctgttgtagatttcccctctttgataaagttccacaatagggcccctttctctccacacttagcagttgcccttctctctttctcctccctatacatgcatatacaccacatcttcccattctccaatctctcctttactttgtcacccagtgtcttgctataaaacaaatttgactgtgttaaaaactcttttttaaaatttctaaaccactaagacaaaatccaaacagcgtatccttcattaaacttttctcatccatctggcctcatatacctcccaccatctcatccctcccttgtcttgatctacccacaatataccctgttctcctcttgtgctcagtttctcaccattccatataactccctgagggtgcccggccccctcttctggttttcatcttagccatgctccaactccaatggcccatctccaatgaagtctctcctgacttgcccagaatcccctgctctttcctccctgctcccttcttcctcagctgctattgtgtattataaccatctggttctacatctgccccacaggccagactatgaattacttgacagtaaggccatgtcttgttcattttttgtttcctgagtacacatcacagtttctggtactaaaaacctttactgtatgcataagtaaatgtcagagaaatatgtaaaggattttagaaagatttctatttaaatagaagaaaactgagattcttaaaaagcaaagctccatttatccagaaaaatcatttatatggacctgttgatgcacccataatgctggagaaaatgaacatttatatttttcttatggctcacagtgatcatcataagagtaatggtcagtttcacacagagtgttactaaaatgaatgcccacttaaaacagatatatcagttttagtgggagaactcgtgaagagaaagattttatatatgctttttctagaaagttagggatccagtttatttgaagacctcagtatgtggtggttttaattttttctatgcatccctagaaaagactacagtgagatttaaatttcagatgctatgccatcaatgttgatcatattacacaaataaatgtgtagcctcacaaccctatcttgatatttgaaaaaagatgatcaggatggtacacataaaaactacagcagtttgttttaattttctcccaattactttttaaaaaacaacaaaaactttcagggtattaaaatcagttcatttctacatcagatttattctaaagtaacagaaacctcaaattagatgctgtacatcacacacaagttctccttgaatccagttgtttatgctacagttacatacaagtaacacaagttgtctttgcatccaatttattgagaacctgtcatttctatggcatgcattaaatatttaaaactgtttatcatattgtgtatcatctcttttattgtgttcagtgattgatataaaaataatttactttatcaagtaaaaaaaactatgaatctctttataaaaatcacatattgtaattgtcagtatagttaaaaacaaaagtagaaaatatgtgatctattacaaatactggcaattagtttttaatttggatagttcataaattttcagatgaagattttacacaacatagacttgtttatatagctttacatatttgttttctaatgctattgtgaactgttgttaatttgtatactcatttctcttcattaatttatgggaggataagattgaaaataggtaacattttaaagtagctatcataaacataaattttcaagtgaatttttcacaagaaatgcttcatctcagatctttaaataaaattaaatgaagaatagaatagaattaattcataaaatattggttttaagaaattattttattccatttatagttaataagttataagttaatagttttattcaactgatttttataaagtggtttaatatgcttcatttttattcctgataggaactaattccagagttctactacctaccagagatgtttgtcaacagtaatggatataatcttggagtcagagaagatgaagtagtggtaaatgatgttgatcttcccccttgggcaaaaaaacctgaagactttgtgcggatcaacaggatggtaagagagattttgcttttgcttgggcagtcatcagggagttaacatattctgtagttttgttttgtcctgttctttactataatattaccaattatacttaacatctataaatacaagcttaaaattttaaatgaaaaagaaaacattttactgttgtcttgacagcattccttattgtagagtggattttccgttcatgaggactaataaagcaatggtaattcagttatgtttgctcctttaggagaagacaatcagatgagcatctgttgactaatataatgtattctaaagtgcttaaaataaatgcctatttcttagttttatctactgactaaatctgaacgcttttttcacttataaaaacactcagaacagaaaaaaatttatttagaacatatttatatgtgcgatatttatgctgtgaaacataccttatggtgtaaacattctgaaatagaaaacatctttttttgttttgttttacagacagtgtttcactctgttgcccaggctggagtgaagtggtgcaatcatagcacactaaagcctcaaactcctgggctcaagtagtcctcccacctcagcctcttgagtagctggggttataggcaaatgccaccatgccaagttaatttttaaaaaagattttttttggtaagataggatctcactatgttgcacgcactgatcttgaactccggggatcaagaaatcctcctacctaggcctcccagaagaaaacatcattattttaagctatattacagatatctgggtgtttaaatgagaaatgtataaacagaatgttcacatatgggaatttgatgggttttaatacatttcacacatatttaaggagattttaatcccaacatggttatagtaggtgacaataaaccactttacaaaacagcctctctagtgtactcttgaattacatcaataaaaccaatgacgccaaatatatttttaaccctgtttcattcactcccaagtttttccaactgtctgataaatatattttattttgtttttacagcttatttatttgaatcagaattcaaataaggtccacacattgtgagggaattcacatattccttaatcctcttttcttaaagagcttaattgaaatataattcatatcctgtgcaaattgttcatcatttaaagtaaaaaaaaaatgaatattagtccattcacaaagttgtgcaaccatcaccacaatcaatttaagagcatttttatcacctcatagagaaccccataccttttagcatcttccccgatttttcctgatttccccattctccccagctagcccaaggcaaacacaaatctactttatatctccattgatttgactattctagacatttcatgtaaacagaatcataaaatatggggttctcctcccctcctctcgattttctgtcacttttcttttggactttactgtcagtcacacattttcttctattttggagctgtatgttctgtctctaagaaatattttacttttaacgtactttattttagaaagttgctgatgtaatatacctatgcttaaaagcatcatctagataatctgcaatgtgttctcccccctttttttttaagaaaatttcatgttttgcataagtcttattgccaatctctctcacttctcaatctgttaaattggcactttcagatatatgcagttatttcatactattcccttgaacaatagcttatttcttcaatttatatttttaatgtgaatgacttatatttcagtaatatatacttctgaaaatttctgattctttttagaattggtatttcatcaccacattattctcacatacttgaatgttatctgtaaatatcagtgtaaggataccagcgctacaaatggaaccctaaaggctcattgtatatcaatatctctcagtcacatcattccattgtagctccagagctcagagccctgcttggcacatactagttgttcaggaaatatttctgagtgaatgaatgaattaatgaattatagaggtgtagtaatctcatagctgttagcatatagtctattaagtccaaaccagtcaaactgaatgaatccttcactccggcaagcaaagtagccaatagttgttggaccaatgcttttgttgatcatgctattgaacagaattctcatatgggtgctgataataagtgcctcttacctgtcaggcattaagcaaggcacttgattttttttaacatttattttacagataagaaatatgaaggccagacatgtttcataatttatccatggcagagcccagattcaagtacagaaaagttttaactcctaagttatactctttccagtatgccagctacctctgatattatctcttctttgtgaaattctttgagattattcgatctctacttttaggtttataattgtcaatccagaccttatttatttcctttaacttcgtggacatggttaatgcagatcattcacagataaagactgcaagtatactaagcttaaatatgcattaaagaaaaatagagtggttatctttattatccactggacatttcacatttattaatttgctaatgtttactgataatgtaccaggaaatgtatatgacattttttagacttctaaacatgcagtaatgcagactggatgagcaggaggccactgttgtttcccagtcccaggactaggccacatttcctgctagaagagtactattttcagtggtacccattccattcagtgtacagataactttaggaaagggatttgccttcttaataaaagactgaaagtttgagaagaaagttttaggatgagcgaagatttactatgatacagggaaaggacgtatgttttttaaaaattggggaagtgggctctcatgtaaatgatctaaaccatcttgtcttaagtttctagtagaggcctaaattaacaaaattgtgttgtgaaaagcatagggcatttggcgttagcatttttgaaagcagttatgtaagatcagtttctcattatagttatttaagcagagacttttttgtattgaaaagaagccattggagagagagtatgatgtctcctttcagtttttgcagcagctcccttatcttgcgttaccaatagcaaatttcagtgagaacaggagtaactaagtatttaaactagtacttaattataatacaggtaaatacttctccagatagagaaagcctgcgcagaatgctgtttggaaataggaacacagctagtcagtggtcttggtgagaagctgcctgctctgtaaatgagccgaagtcataacaaagataggtggaagtaaaggtcctcagtgatatctcttcttaggagtacgtctgcactgatgcttccaaatgcagacataggaaacagtggactaagtgattggtcaaatgcctccagattcgtccactgaaaaataatttgtttgctatagaaattggtccccacagtttttcctcctttttgtcttcctctctgctcatagctcacactgtcttcttagctgttctgctgtgtttattgctttacctgattaatagacatggcaaaacaggctttaaagataaattggtgaaaccttgtccctacaaaaaatacaaaacttagtcaggtgtggtgacacagtgtctgtgattccagctactcaggaggctgaggtgggaggatcgtttgagcctaggaggtcgaagctgcaatgagccgagattgcgctactgcactccagccgagatcgcgccactgcactccaccagagcaagaccctctctcaaaaaaataaaataaaataaagataaattggcattcaacaaatggtgctggaaaaattggtgctagaagagttggatatctatatccaaaaaaaaggaaggggaaggtttcagtccttacatcacaccatataaaaaaattaactcaaaatagatcatggacctaagtttgaaacctgaaactatcaaacatctaaaagaaacatataggaggaaatctttgtgactttatgttagcaaagatgttttagatatgacaacaaaagcacaacctataaaagaaaacattgatacactggactttattaaaacttagcttgtttgaacactactgtaagaaaattaaaagacaagccacaggctgagaaaaaatatttcaaaacacatctaataaaggactaggatctaaaatatataaagagcactcaaaaatcaataaaaataaaacaatatttagataattaatttttttaaaggaggggcaaaagaatcttcagcgaagaagatatgtagatggcaaataaacacatgaaaagatgcctcatatcaaaaattaatccacaaattaaaattaatcaaattgaaaccacagtaagctaccattacacattagaatgactttaaaaattaaaagggggaaaaaaaaaaaaacctctgacatcccaagccctggtagagatgcacaatagctgaaattcacatatcctgctggtacaaaacagtttggttgtttcttataaacacacaccaaccatataacccagcaaccctgcttcttggttttagccccccaaaaatgaaaacttatacaagtacatcaatgtttataatggctttatttgctttcatcaaaagctggaaactacccaaatatttctcacctggtaaagggataaacaaactaaaataaactatagtaactccatattatgaagtactagttagccataaaaaagaaccaagcactgatacatgtaacaaaatcactttcttgctgtcacttggatgatgccaaaacatttttaacggctttattaaaatataagttatatatcataaaattcacttgttttcagtgtacaatttaatgatttttagtaaattttaacagttatatgaccatcaccacagtctaatcttagaatattttcaccaccccagaaagattccctgcccacctccagcccaaggcaactgctaatcaactttttatctccaaaggtttgccttttctgtgtatttcatataaaaggaattatacaatatgtggtctttgagtttgacttctttgagtagtttttgagattcacccatgttgtagcatgtattggtactttgcccaactttttacataatactaccacattgtgtggaatatcacattttgttcacccattcatcagttgatgaacatttgatttgtttctactttttggcaattttgagtaatgctgctatgaacagtcatatacaaatttctatgtgaacatacatttttatttatttggggtatagacctaggagtagaattgctgggtcatatggtaaatttatgtttaacttcttaagaaactgcccagctgtttctcaaaatgaccttgcattccccagcaatgtatgacagttccagttcctccatagcctcactcccacttgttattacctgttttttttttttattacagccattctagtgaatgtgaggtaatatctcattacaatatttttttttcttttttttttgagacagagtctcgctctgtcgcccaggctggagtgcagtggcaccatctcggctcactacaagctctgcctcctgggttcacgccattctcctgccacagcctcctgagtagctgggactacaggcgctcgccaccacgcccggctaattttttgtatttttagtagagatggggtttcaccgtgttagccagagtggtctcgatctcctgacctcatgatctgcccacgttgacctcccaaagtgctgggattacaggcgtgagccacggcgcctggcctacaattttaatatatattccctagtgactaatgatattgagcatctcttcatgtatttattgaatgctaaaacatttttagatttattttaataaaacatttagtgattcattatagacacagaatttgtgttcttcatagtcaaagaagtttgtatgcccccagaattaataattttattactgatgtgcctaaatgaaatagaaaagccagtcttgcttttaaagacaaatcccctagacagtgttataccccaaattttttgaatgtaggaaaagctaataattattgttgatgagaaacctttaaataattaatgttggtataagctaaacaagcaagacctacctatatctgcagaaaatgctacattcaactagtgtgttgggtggtaatgcaatccaactaaataaactttccagataaatgaattttctagattttcctaagtgagaactttttagaagcattatggttatctgttaagttttattttatttttaattgacaattaataattgtttatatttatggggtatactgtgatcttttgatatatgtatacaagtcagaatagttagcatatccatcacctcaaatatttatcattgctttgtggtaagaacatttaaaatatattttaaaaatatatatatttacatatatatataaataattaactacagtcactttgctgtgcaatagaacaccagagtttattcctcctaactgtaactgcaccattgaccaacatttcccctttccctatccatatctcccatcagcctctggtaaccaccattctactcactacttctatgagtttgacttttttagattccatacataagtgagatcatacattatttgtatctctgtgcctggcctattttatttaacataatatcctccaggttcatccatgttgccacaaatgacagaatttcctgttatttcttaaagctgaatatcatttcattgtttatatataccatatttttaaaatccattcattcgttggtagacacttaggttgcttccatatcctggctattatgaataatgctgcagggaacatgagaatgcaaatatccctttagcatactgatttcagttactttgggtaaatacctagtgggatggctggattatatggtaattctatttttagttgtttttgtttgtttgtttgtttgtttgtttgttttgagacagtgtctcactcttgcccagactgaagtgcagtggtgcaatcagtgaccactgcagccttgaactcccgggctcaagtgatcctcccacctcagcctcccaagtagctgggagcacaggtgcatgccaccacacccagctaatttttaaatttgttatagagatggaagagtcttgaactcttgggctcaagtaatcctcccacctcagcctcccaaaatgctgggattacaggcatgagccaccaagccaggcctatttttagttttttgaggaatctccaaattgttttccaaaatggctttactaatttatgccactactaacagcgtagttgttccccttttctccacatctttgccaacacttatctttcatcttttttataatagccaatctaacaggtataaggttatatctcactgtggctttaacttgcatttttctgatgattagagatgttgaacattttctcatatgtccattggccatttgtatgtcttcttttgagaaatatttatttaaattctttgcccatttttaataggattatttgtttccttgttgagtagtttcggttccttgtattatggttatctttctaaaatttattactactttgttccctgcccttttatacaaggaatgatacttcattttttacttaaaaaagtcaagtttatcatcctgagtacccattgttattccatgaagtgatataattccatatctattattttctactttcttcttcaggttgtcagctatcagtacagttccctttaatagccctcagccataccaatgaaaattggttgtttacaatctcttctagactacaaaaccagataattcattgtatcaagcccttattataaggcttaagaatcagtcaagtgctcagtgaggccgtagaggaaatgtgaattttgtagctctgatagggagtgactttagcctctacctcaagtttcactggccactgctgatttggaagttgtgtatcaacagatgaagtgacaaaaccatccttagtaaattaatgtaactacaggcagcaccaggttaacacttcttcttacatgcaaacagctatctggctggcctaaggcattcttctcccctagtatagctgcttgcatttgtttctcctctttcctcattccaagacttaactgctgacaactgctgcaaatcagaatggataccctaatcttagccaccttaccccataccctagtgatagtcctgagtcatcctgatatgaaggttgaccaggatatcataatggcaatgatagtgcttgtaggacatgccatttgagtgtgtattctgtgccagatactgtgctagaacttcaggtgcatcattgttttaatccttaaaaaatcactttcagaggccaaggcagatcgatcgcttgagaccaggagttcaaggaccagcctgggcaacatgttgaaaccccatctctactaaaaatacaaaaaaaaaaaaaacaaaaaaaaattaacaaggcatggtggtacatagtcccagttactcgggaggctgagtgagagaatcacttgagcccaggtggacagtgaggcaacatcacaccattgcactccagcctaggtgacagaataagaccctgtctcaaaaaaaaaaaaaaaaaaaattagctgaggagttattgacctgaaacccattgaggtaaaaatatattttttttgagacagagtcttactctgttgccctggctggagtgcagtggcacgatctcagctcactgcaacctccgcctcctgggttcaagtgattctcctgcctcacccttccgagtagctgggattataggcatgcaccaccacgcccggctaattttttgtatttttaatagagacagggtctcaccatgttggccagcctggtcttgaactcctgacctcaggtgatccgcctgcctcagcctccaaaagtgctgggattacaggcctgagccaccatgctcggccccattgaggtaaatttacatgccaaataccaccaccttatcaaggtgtcagtgttcttattcacagtctccaggataggtaagtggtggtggcaggcaagaggagccgtggaggagaggagaaaggagaagagaaggaaatccgaagccagctccgtagggtgagcagaagatgggaagagatgagaattcagcatggtccagccccagcagcttttagggcctgactgtctatggtccctgtttctatatcttttaccctccacccttacccgtaaggcttcctttcactgccaggaaaccctgaacttacagctgaggaagtgccagctctctctgcccatctggtatgagaggaagtgtgtcctccttcaattctacaaatggaagaaatgatattcatttacattctaagctttgtagtcatgggattttagaactggaatacacctttatttgaatgaggagtctgaggcctaggaaggcaaagtggttcatggaaactctgaacccaagtgcttttctaactaaccatgcttggtgtcacaagttggaactctgaatgtagtgtccccttgttccgtcttaaagtctgtaaaattccacctgtattttgaattaaatttaatttatagattgacctgcgaacaaaaccatagtagaataatactgtttctactgcaatatatattccaatcaccaaattataaagaaactttggaatatcctgtttgttatttgcaaactgtctgtatctgtgcttagatggcctccaaacacctaattgtgacccagacttaaaattcagttttcctcagtgacactctggtctgtctcagtacacatgtgatcaatacacaggttttcttttaaaaagtctctttaaaaaacctgattctcaccagatggtttcatgacatttgggttttagagaattaacagattattcattgaaaggaatagcctgaaaaattgtataatactataaagacaatttaaactctgaagtaggttttccctcttactgtaagagagaataaaacacatgaatacaaattctgagtaacaatttttaaaatttataattgctcagagtacttatattgcacataaattaaatataacaaataatttactcctgatactaatatgaccagtttaagaactgacttctgtttatatatacttcttacctgttataacttgtctttttaacatctaaagtgctgataagcagactttattcaaagtgtgcttctttaaaataagcctcacggtgtagcatccctgtaaatacatattaatccagccagctgtgtgcaatgcactaggaactgtaaggattcatatgtaattcagtgaagccactgttcctcaaatatttactctcgcagattcagaagaattaagttttacaactaatatatgaaggatacatattgtgcatctctggaaatataaaacattctcagaaatgaatagtccattttaattgtaagtagtaagttccaacttgtgttcatgaaggaatgagagaagcaaggcactgcagtttccctatgttctaaaccaaattcctgttatttcatcataggaattaatggatctggtaagacttgtgaactgaaactttattccatggagcgaaaggctttatacaaaattctgcatattcaggataattaaactgccccagtctgtgttctctgcatcacctggaagcagtgccgggtgaaatggatcacgtgtaggagtgcctcacttgaaaagtgcttattgtttctgtgttgtgcttctgggttttccttgaaggaagcctacggaatagaaagggaaagctaccttgtgtgtcaacaaaaagctgtatccataacagctatagcagccattcttagttgcttcagaattagagctaaaggaaaagcccacactgctgcctctgagaactgtcttaagcatcaacgctacgcaaagacatctcgtgaaatgtggctgcatgattctgcagctgctcgtctctcagtgtctcctgtgctgcttcaacttgaagttttccttcatagcacctttttcatagtttctgttgctccaactcctggtcggttttctcatcctactactaggaaatgatcatactgatctcttgcagaaataatgtcagatatctgtgttaaaactaaaaagtttaaccagttatctacatatgttcatacttgctgaaggaatgtttatttggtgagtatttatgtaatatacaaagtctaggcactcatataaaatatcaagtatttaaattttccataaattccttgaatataggctgtattttttatgttgttttgtaactttaaaagtttctaactttatattggctgggtaattcatacaggatttagttcttatgaaatagctttagagaaaatgtgctctagtatatttataattttgactaggattatcttcagttatttgaaagagttctttgtaatgagcctaaagtataaaatgaaaatgtcatatattccaaagagatgacattcacagtggtaaaaaacctccatttctttgtatggattagtattctgtacctatgagtattccctccttctttcaaactgtcattaagaaattcaaggcaaagatgacaaaatattataaaaagtgatatcattgatgattaaatgcccagctttattactgcatgccagcaattgaacagcaggtatttgatgcatttgtagcagactttacatgtctacaacctaatttcattttttatttttttaaaaaatgaagcagtactttgttgtttaagttatggacaataacatgtatgtaattggttagaattgtttgttttgtaaatacagtgccaagagttatgtttcgctgtgaaatacaaagtttactctcactagaaaacctggaaaagcgatacagacacatttagtagacatttcaatgcattctaaggtcattaagtttatacgtcaagaattggtttaatttatccacatgaagctaggcttattagactgacttactcatgaaacattaataaagcattgtgtttagttctaacctgattataatctgaccttctgacaaaggacagaaatagaaagtatctgataacattaccctaatgctgggttcatccatcataatctacccttttaaaaatttgttttagaaaaaggccctttcacggatgtgcattgataatctcatctcgccctcagcccagcagattcctggtgctgctgggccaagtacaggctgtctgcagtcagcagagcatgcacagcaactgaggcaggggaagccaagctccagtgtggctctgctcatattgtattataacctttacagaatgtccgtatttcaaagaaaatgtttcctttttaagctgggttttttttttaagtagattataccccaaatgcaaatgtaaaaatttgcatttggggtataatctacttttaaaaaccccagcttaaaaaagaattttaagcaaataacataagaatttttggaagtcttatgtaggaattcaaaatatcaagatagacatcttgtgtttgagtgccatctctggaacacctgttagccatgtgttgtgctgaacccctattaacttcaacagggatggcaccaggttctagaggccaaagaagagacccagagccagtgagcatgacatagagttttactggggacttacctatcggggaaagtccagtggtagcaggctggacaggagacccatatggctcagtggcagcagactggacagcagaactgcaaccgcttgcaaaaaacctgctgtttatatcacatttttatttaacactcccccacccaaccacaacatcctgtatctggcaaccttcatttaacccaaaacaaagggccttgattcccattatggcctgagttccaagagatgggccagagggggctcagatattcttcacagataaggaatggatctccaggttggccaccccaattccctagcttgagactctcaactgcattcaggtgtgtctgccatacagggtctttctcaaggtttgttcaagtcatcactgtcaggtgcagcttaccgcacaccatgacacttggaagtaagacaccctatctcttggaactgcagtgtcctccttatttctcaaattgaggacttgttcattccataagtctttactgagagctagttatgagcaaagcattatggaaaatacaaagaatggccatggatcctactctaagtgaagttagagtagagaaattccttcgttcattccgtaattatgaaggggctatcatgcacttcatcctgctctgggctctgggaacacaaggatgagcaactcagtgagtggcttcagaaggtgcactctagttagggacacagacaaataaacaaacagtcccagtaaacactgatagtgtttattcaacagatacctgttgagtgttccgggtgatgttttatgtgtttgcaaggatccctgccgtcctggagctcacttttgatcaaagggagacaggcgatagacaattttttaaaagtgaaatatctagtatcttagaaggtgaccggtggtagaaaataccactgcaagaaaaggagactgtgagtacctgcaggggagagaggtcaggacagcctccctatgaagggagattagaggtaggcctggaggagcagagggagggagccaagtgactctcttggggaaagagcatggtgggcaaagggaacattagagcaaaggccttatggcagggatgtggttggcaaggaggccagtgggccaggaaagggtgggcaagtgggcacacagtaggacaagaggactgagtagtagtgggggagcatcacacagggtcttgaaggccatcataagtactttgcctttttaccctgagtaaaatgtaaagtccttgcaatcttttgagtggaagtgtgactgatcttccttatgttttgaagggatcactctggctgcagtgttgggaatgaatgattctgcaagggtagaatcagggagatctgctagaaggtaatttgagagatgatggtggcttggaccaggggtagcagtaaaagtagtaagaaattattgattctgggtgtattttaaaatttgagcctatagtctccctgggacttcctaccagtggccattttccctcaggtatctctagtcttacagaggcaggtgaagggctggggatgagcatgcggagtagtgatggctacagcagcagagatagataaatccatcttagcagaacattttagagagttcagctaaaatgaaagcgtgggtgtttagtgcctgttgtcaacttggccctttagcagaaattctaagcagcggaaaaagccagagtcaacatgtttatcctccgctagactgtaatctttttcaggacatcgaatgcttattcatctatgtgtcctctaaggctaatgtctgacatatggttggtggtcagtaatctggggcaggagagatattagactatattcaccttgtttatttgcatttcagtgggatctgctcccaaagatcagaggttttgtcttgtttgtcacagcatcccagggcctagaacactgcctggcacataacaggtgctccatgttgaatgaatgaatgctccctctgtttgaaatgcccttctcccagatgtctttatagttcatttcttcactggggtccttaattgtcacaaactcagagaagccttccctgacctcctcccctaaactagcaatcctcccccactacacatacaccctactccccatcctgcttttctgtttccttcgcacttgtcacctgctgacacaccctgtatcttactaattatgttagtttttgttggtctcctcccagtacaatgtaaactctcttgcagggactttgggtttttttgttcactgctataatcttacaatctagaagagggtctgtcacaaagcagatggccaatcaatatttgctgagtgaatgaatgagcttcttccccagccccgccctcattactgacatttcctttattccttcctcttgtgatcatcacatcttttccactgctttaattaataaacctataaatatttattaaacagttattatccaatgataggttaagagttgtgggaaatgcaagataagaattagataaagtccctatcttcaaaaggcttacattctaattgaggatatagtattaactttggaaacaatgaagtgctaattggcaatcatcccattcatttgtacagtacctcacagtttgttgtaaaatgatttcacaagtaaatttgcatgtgttatcttactctattaagtaacaagaggatactgatgaaaagtgttgggtagaaattcatagaaaaaaacaagtgagagctgagaacacaggaagcaaacactgaacttgagtaagaaggatgagtaggtcttcaaaaagcaggaagacaatgctttcaagctagagagaaagaaagcaaaagctctgaggtcataccagctgctgtgtgcccaagggctgtgaagtgtctgtgctggggaagctaaggatttatatcaggaagtcctgagaaacagtggggaaaggtgggatggaggtttgaaaggcctgagtcacataggttatgctgggaggagcagtggcagctttgaaaaagagaatggcaatgtggacatgatggcttgacaagtctgtcccacaagcaggacaccagacagactggattcagaagaagtttgaagtatgttgtagtaacccatgtggagagctgtgagggttagaaataatcttctgtcttatacatccagaaacagtcaagtactggaataatttaagccccttaaaataaacatcaaagacaactatattgtctctacttaaaacagttgaattattgaagttgtaatagctacaacttcagtcaaattatgaaaagaagatggcatagacactacagaagtgacaatatggctttctgattatctacttgaatatatgcaactctatttagagaattttttaatctcaaaagcagatttttgacgtaatgagaaaaagggatgggaaatatttttgctctgatctagaagaagacatgggtatttaatattcttaaattttaaaattcaggagaaatattgtctcctcacagttaaatttggtagtctactttcttttttttcataaatttcggagaagctttaccccaaacctgctagagaaagaattctgtaccatccaatactcatgggagaaaatagaaattagaatgagggaaatattatccatctaagagatatcctctctagtttaaatatcactctttatttccttctttccagatccccagggtagagctctggattgggaattggtttatctaggcttaacgcaattgcttctgcctttagatatgcaagtagagggtaaagaaagctattaagaccattatgacactaatagcttagtaatcaagtatttctttacatttttccaatgtaagtattgtactaaaaatcccgtttcaaagtgccaaataggtttgtatataaaaatggttctgaaaagaacaaaataaacagataccaatgaccggtcaatactgtttatagtaaagagtcttaatgtcaggcttcagctttagacaagttgttatattttaattattgatagctaatgttccattcttagatattcatttaattttgaactagatttagcttttaaatgtgtaaactgtatcttcttttctttctgcacagtaagtggcaagataaaaaatcgacaagactttgtttaacctcttacctcattgttcctttgccatttaattttataataaaaaagacaaaattatttaactataattaattatttattgattcactatgctgcctctctaagatatagaatagggtaaataactatagacataaatattttttaatttaattaaagactattatgagcatctatgagctaataaatcttaaaactgagatgaaatggatgaatactgagaaaaatatttaaaatgtcaaaattgagacttacaaggcttatggaaatttaaatggtaaaatcttcccatcccctcctcaaaattcaaggcccatattacattacacgtaaattctaccaaattttcaacagataatgaattcattttcttatacaaattgttccaggaaacatggaaagctatccagctaattttatgaggctagaattccaaaaacagtgaaggggaggaaaaagaaataaggcttatttcatgtacggctataaatataaaaattctaaatgaattcttatcaatgttattaaatgtgtgtgtatatgcctgtgtgtgtgtgggtgtgtgtgtgtgtgtgtgtgtgtgagaattgcatcaggactaagtagagtttaacccttaagatcaggaaaaagatagggattttccacatcaccactgctgttttacatagttcttaaggctaagaacaattctataagaaaacaaaaagttgtaggtgtaactactaagagtggctacaaacacaatcaacttctagaaatcagtatcattgttctacatcattaataaccaagtataaaatatagtttcaaagtattacagttgcatcaaaatttatgaagtatctgggaataaacttaaccaagaacactaagataaaacttttatggagaaaattttattttttaactctaataaaggacatagaaaatgatctgtataaatcaagatatttggggaccttggatagtaaaacctagtgtcagtgttcacaaattaatgtataaattgattggcattccaatcaaattcttttgatatatctatgcacttaatgtaaaagttacaaagaagaataaatgttcctgaatagcctagtttatcctgaaaaaaagaataaattctagcacatattgagatatgtaagaaataagataattaagataaggtaataatagaaatgaaaaatatagaaagctggacacacatacgttgacatgataggtacatagaagagagagcaaaagaatataaagataaaataaattaagataataatagaaatgaaaaatatagaaagctgggcacacacatatctagacatgataaatacataggagagagagcaaaagaaaaggaggaaggagactgggcttctatgtagattatgatattatctgtaaataacggcagctttatgtcttcgtttcaaatatatatttacacagtaaagataataccatacatctctgagaaaaggaatttttgtttaatagatggtattggaaaaactcactcactttataaacaaaaataagactggacccatatctaatatcatatatgaatgaaagtagatgtagattaattaaagatcaaaatatgaaaagtaaaaccataaatataaagctaaatgatacaaatatatttatctctataattcaagacaaaacctcaaagcataaacatttttaaaacatgatttgatgatctcaaaattaagaaaatatatccaacaaagaacatggataaagttaatagatatatgacatttgggagaatgcatttgcagtgtttcaaaccaacaaggaactcttatctaaaatatataaatcaggccaggtgcagttgctcacatttgtaattccagcactttgggaggccgaggcaggcggatcacgtgagctcaggagtttgagaccagcctgggcaacatggcgaaaccctgtccctgcaatacaaaaatacaaaaattagccaggcacggtggcgcatgtctgtagtcccacccagctactcgggaggctgagatggaaggatcactggagcccaggagacggaggttgtagtgagctgagatcgcaacactgcactccaccctgggccatagagtgagatcctgtctaaaaaataataataataaaattaaatatataaatcaacaatataaagacaagaacctccagtgtttaaatgggtaagggatatgaacaggaaatttacagaagaggaaacccaaaagaccaacaagcatattaaaaagatgtcaaatctgttagtaatttgaggaatacaaattaaaacaatgagatattattttgtatctcttatactggccaaaattagaaacctggataatactaacagttgatggagataaggacgtatagaaactgtcatgcattgctagagagtgggcacggatgactcacattaagtatgcactcccagttctactccagattataaatcccaaagaaattctcagaaagatccaaaaggggcatttatcacaggcttgtgtcatggggattagaggtagcctggtgtttgttaccaggggagttttgtgcagccatgagaagcaatgggctagtcacacagtgacacaggtagatttttaaaataatactaagtgagaaaagtaaggaacaaaatgaaatttttaaccctatatatttttatagttcaaaagtatatccacaaaagaatgagtaatattttataagggcacatgcaaacaaaaggagaaacattaaatacattatagttattgcccatggtggtggaaggaaatgaaaataggagatggagataaaagagaaaaaacacattttaaaagctcaaattattgaaaagtcatcattcccactaccactcatgattccattaggtattttattcaataatggttttactctaatagagataatagtaaatttcatcaaacctttctttagtggtatctataagatatatttgtaatgaatgcgcttagctgatcatgttggtaaaatcttcctttaaattatttatctgattccataactaaattgaattcctgtgaatagacttgagcagtagttactcaataatgaacctctatttactcattttttaaatcccttcatttattgcatcagacactgaaaatattactaaataattagactgacattttttcttaattgaatagttatagagaattgacaaaatcatttatacaaattgaccaaactaatatagacataatacagaattttaaccatctcttctttcagactcatttcctgtgttctactctgaactgttatttcaagatcgatgagatagacaatatagaaattctgtttgcctttagtatggaaactgttctttcataaaatgtcattgtttacattgctgaatgagaaacatccacactaattggtgtagatgaaatacaaaaaattttgaaaggaataaatcaggaaagggattgaagggaataaattactagttaaatgtgatcacaggaaaagttgaaaagtattatttataatattttatatacttaaaaaatgaaaagcagtttttggcaatcttaattcaagaaatcatttattcattaagtgaattccaaattggtttcaacaccatggaaatcacagagaatgactttgttcacatatttagtgaccgccgtaatttagaaaattgtcttacatggctctgcaatagctgaaatttacaaagctagatgtacagctcttttccatgttgttgaaatcagtgtcctctttaaatcactaggaagttgatgataaatgactgcagtaagtgagaggcgtagtgagccatgcaccatcactacttatttcacggacctgagcaagactccctacctacctgtcaagacacctctaggaagcttctgatggcttcttaggaaataaaaaggccttttttttttcttttttctgtttatggaaacttagtatgggccttgactctcagtaatttatatttctttcccattagctagcaaacatccaaaattgcccagtgattcccaaactgtgtaatagctgagttaattcatagtggaagaaagatattcccttctagtcatctcagaggtaagctggaggacttcaggcaggaaaataaatgtatatcagagtttctcataaaattgcttaatttcaaactaatatttaaaaatgagaaatgaaactgtaacatggtattaaaaaaggtaatttaaattatttttcttttaaacatgagtgtgttttaataagaaatttatttatgttaaatcatattatgtacctaatggagccaagagaaagtttagcattttagaaagggaaaattttcatttaggtctctgtactttcatttaggtgtctgtaaaatactactgaggtagtatttttccatttctaggaactgaagatctgatacatataaatcaagtacagaaatttaaagagcatattctcctttttatatatatttcaaagtaaaaaaaaaataaaaggatatgaaggtgtactaagttttgatggtctctcatttctttcttgactcatttcaggccctagaaagtgaatttgtttcttgccaacttcatcagtggatcgaccttatatttggctataagcagcgaggaccagaagcagttcgtgctctgaatgtttttcactacttgacttatgaaggctctgtgaacctggatagtatcactgatcctgtgctcagggaggtaggtgttaaatcccatattattccaaaaatttctgtcatctctcaaacacaaatttgacatttcatctctttctgtataattttgttttcaacataacttcttacaaaacagatttcaggttcttgacatatgtggaaaaattgaaaagtcccaaaacaagtaatgcaaccagtatgtggttcctttttaaatttcagacactttaaatatacttctatatctgtatatttgtttttcttacttcaaaatttacattaaaatatgtaatgctttacgtattttagtaataagtgaaacctagctgaatatttaaataggaatattccacattaacataatctgccactgtggctattcttaaaaataacagcacaagtgctaggattacaggttcagtggctcttgcctgtaattccagcactttgggaggccaaggtgagtgaatggcttgagcccaggagttcgagaccagcctggccaatatgctgaaaccccatctctacaaaaaatacaaaaattagcagggtgtggtggcgcagctgtgtggtcccagctactgtgggggctgaggtgagaagatcacttgaacccaggaggcagaggttgccatgagccaagattgcaccactgcactccagcctgggtgacagagcgagaccctatctcaaaaaaataataaatataaataaaaggaatatttctaccttttagacagaatactcaaaaacatgcatgaatgaaatagatgcagttatgctattttattcttatgtgttttcaatctgaaatgtttatagctaacagttgggaattatgtgctgtagtatgtatatagtatttttagtgaaaatattcatataaaatattacttaaatcatttctacattgcacaaaatgatttcagataagtggaaagagtgaagatgcaacagctgctacataagtgttgcttcaaggaagtgatatcccagtcttccattctaccagatatctgccatctgtcgtatgcaaaacaagtaatcatttctgcatctccagccagtggaatgcttttcttattttttattttaaaggtggaaaacttggagatgggcgcaatgaagctctacagaaaaatttgcattcataagtttatttcttatatacctctataaaattaaaatgactccatttgtatggttcaagcaaagaagaggaaaaggaagggaagagcctcataatcattgatccttggacccttagggcaaaatattctgagaacacgttgcaagcgtattattaggggcaatattgtaccatattgtgtgcacacaagataaaattattgcctgaagccaagagaaaaacatagagacagaatgaatgaatgagagagaaggcaggtgttatgaaatggctggtgaaataaggaattttctctacaaatcattacactcacccaactgagtatccccagttgtgtataaattgtaatcagattatttggtaggagataattctgagcttaattagtctcaactgtacacccttgcttattacatgcctgttttattaaatactttataaactattcttttaaggctaataccttttagaatcagaaaaaaagaaaacagttgtaatagttcatccttatattctaagatcaactgaattgtcttttgacttctaaatgtcataggcatttttgcttttggatattttgttatacatttttacccattataataaagtcctgttcttataaagaaagttgcaagttaatcctgttgggcaaaacaaattaaatacattaaacacaaaataaaataaattaaataaattaaatacaaaataaaatacattaagcatcttatatgtgatgaaagtgcaaggcagcattaaaattgacagaaaaatagcaggtttgtccaatttaaatgagggtttaaaaagagataactgaaagaatttgaaaatgaaattaaaatggaaattttctttacatggatacagtgttcattatttgaatcttatcaaaatacctgtttctacaaaataacatcattgctttggacagtgaaagaattgtgtataaggctttgttaatgtagaacttcttaatgaaacattacatagaaatgtaaaatttaaaatgtaaaaattaaaaattaaaaattgtcttctgttgaatgggaatgattcaagcatatgttggcatattatatagatggtctgaacaatatcttgtattacagcttcatgaccttctagtgatgcagactctctgctactagggtgcctcagctcaggactctgtctcctttcagcatgctcattcgaagcacataattgccagacactcaggtttcattagagagacccagagtcatactgtgaaatgttatgttctttctccccagaccccttgcccacttcctcaaccctataattctgtgtcagttcttagaacacgatacatgtgaaggagcgcatacctggaatactcttacttcccttcccccagcccccagaggcctgagcacacatcagcagagaggtttaccatgaccctgtggacctgtgtggactcaagattgcttaggaagagcctctatctccttgtgaccactagggggccatttagtacagtgtagacataacagattaaatgatttcaaggaatgctagttaatttcccctttcccacttcccaccattcccccctctaacatattcccattgctgttaatgccagttagccaagtagaagctaacagattcccacaaagacagttctgcactaacatttaagaatgtgaggaatagtgtcctccaaaggacgagagcccacctgaatcctgtgagctgggtaagtgaggccgagtcattcaatctcactttacctcagttgctctctctgtaaatacatctattgttataagaaagaacccagataaaatggagtgaagtacagcatattcattatttagtggtcatttatgcacccttacctatatacaacccctatgagtagaccatgtgggaggcacaatacctttttttaaaacattcttgttgagttcctggaggtcttgtactgctgtgttgcgacttgagagagttgattcccacctaagtggttggacacagactcttggaaaaagcagagtttaagatattaacccttttattgagctcaatacatttattttatttgataatgtttatcttagtatttttaaaatacaaagattgtacatttcatatagataaaaccaaaggaaggctaattatggctacactaaactccatctagcctaagatggattttttcatgcttaaattaaacactaatttaaaaagagaaatatttaatatatgaatatctatatatgtctcctttgtaaaaaaaaaaaaaaaaaaaaaaattctactacttgcctataactttgagttttgaagttagtgctaaagtttgagaaatggcttaaggttattgattcattctttcttgacaggtgaaatcatgaagcagcactaaccacagcaattatggcattaaaatgtcaagaaattagaggtcagaataacagataattttcttctctatgtcagattgaaaattgacattctttgacagtttaggaactctggctgagaaaattatgacagcttaacttattttatacttgtaaagcagtaattgataataaactttatcatgacagcctctgggcagaaacatgacagtacagttctggtacaaagctcttcttaatatgtaaacactagatctgttggatagtagatattatttaaattgtctaaagtcttggcttacatcgtaatcttctatgcactttttttcatagatgagctgtactatttgagcagtttttcaagcattataaagaatattttttcttatcggtttttatatattaataaaaagtatatgatctgatttatatttttacttactaaatgatgaccaagaaacttcatcctatgacctgcttaggaaagagaatattctggttggtaatcatttagtcccatggttttctaacaccttgatgctcaaatgtggcccataacccagcagaatcagcatcacctgggaacttgctagaacttcagcctctcagccttccccaacctactaaatacatgtaatgagatccctaggcaacttgtttgagacattaacttttaagaagcactgctctactaaaggtgtgttagaatcatttggaaagctttttttttttcccctacaaaagtacagagaatggtataatgaacctccatgtacctatcacccaatttcaaaaatttaaaaccatttcatcaaaacctcacccctccccttgtattttttttctttctttcagagacagtctcactctgtcaccaaggctgaagtgcagcggcttactgcaccccacctcccaggttcaagcaattctcccacctcagcctcccaagtaactgagattatagacacccacaaccgcacctggctaatttttgtatttttagtagagacagggtttcaccatgttggccaggatggtcttgaactcctgacctcaggtgatctgcctgcctcagcctacaaaagtgctgggattacaggcatgagccactgtgcacggcccccctgtactatttttaatacacatgtcatacccatctaactccccatccactctatcctccccatcacatgggcatctcagaatatccagggaaaggcttcaatgaagcaagtcttattttgaaaaaaaaaaaaaaaaattatctgggaatttcacacacattcccaattaaaaaccattaatctagctaacactctcattaaataattttttgtttgtttgttttgagacagagtctcgctctgtcgcccaggctgaagtgcagtggcgcaatctgggctcactgcaagctctgcctcccgggttcacgccattctcctgcctcagcctcccaagtagctgggactacaggcgcctgctgccacgcccggctaattttttgtatttttagtagagatggggtttcaccatgttagccaggatggtctcaatttcctgatcttgtgatccgcccacctcggccttccaaagtgctgggattacaggcgtgagccaccgcgcccggcctaaataattttttcagctgggcgtgatagctcacgcctgtaatccccacactttgggagaccgaggcgggtggatcactaggtcaggagttcaagacctgtctgcctcagagtatgattatattgtatgccataggcaacaaaaatggatagaaagatgggaatgatattataagttgtatcacagctcaaccattagtatttgagtgacattaagtcagtcacttgaattttatgtacctgtattttctcacctaaaaaattgatgacagagatgatacctaattcatgggagaaaaatatgtgaaaatacttaaactataaagcactacacaggcattattacctaaaggcataattaaatgaagttatcttagaagaacttttgttttaataatttcattatatatgacaccaaaactatcaatttaattttaaaaaatctgttagcaacagagaaaataagttaatttgtttttaatattatttagtaaaaagaagcagttgtggcttttaaatttattttcaatactgtctccaaaattttataaagatggcctaattgcagcccacttattgcctgtaacattctttcttgatctaaattagtattagcatttatatcctttattatcctttatatttttaaaagttttacattaggccaggcgctgtggctcatgcctgtaatcccagcactttggaaagccgaggcaggcagatcacgaggtcaggagattgagactatcctggctaacacggtgaaaccccatctctactaaaaatacaaaaaatagctgggcgtggtggcgggcacctgtagtcccagctactcgggaggctgaggcaggagaatggtgtgaacccgggaggcgcagcttgtagtgagccaagatcataccactgcactccagcctgggcgacagagtgagactatctgaaaaaaaagttttactttagtgtcattagttttgtattcatattatcaaatgaattagcaacactattactggcattaaagttgtactggttcagcaagagaaaaaaattgagtcagtatttcaacagaagctgtaagcatataccagacaagttattaacaagatactaagttctgaacttgtcataatacttgtcatcattctatagttgacgttgccagactgaaaatgatttcaatggcttctttttaacggtgagaggtatgcacataagtctatcataaaaggctgttttgctggcagctattagaacatgtgagccattgcaatatttatttatagatatacacatttatttatgctggaaatattaaaatattaagtagtttttaatattaccaacagtcataaaaatgtggcatttttagtctaattttctgttaatatttcttggctttcttagcttatagtttctttttctatctttttctcaatctgacagggataacactgcctccctttggatcggctatggtgaaaatatgcccataggaagtaggctagattacttcagtttttactttattttcttgctgaaatattccttgctactacagagaattgacatgatagggctgtcaagaaccagaagatagatgtgtctttaaccaaaacagctgcaatgctggcttttctgagaagatgaattcataaaatttataagacaaaaaattaacacactttttcatcctgatgatgtaaatgaagggtaatttaagggcccataatgacaacattgaggacctctacaatcattgtcttccttgaattctttctattattctttattctttctatgaatcctttattcctcagcctttcctccccccatttctgattctctttgatatgacaaggaatatcaacaccacctgcccgatctgcgtgaatgagttgtagcacaaggttatccatttacaactgccatgatgcctaattgtcttcatatgggggatatccagggttcttctcctgggcagttattctgagaagtgattgcaacaaatgatcacaaagtgggtgattaagatttcttaaaaccatcttaatttccccctataattactgcatgttttactgggatgaaaattttaacagattcaaaagccaaattaaaatggaaagaaaacccctacattttaattagtggagtgaaaatacgtatttggtgttctttaaagctaaaggatcattttgggaacatgaaaaataccatgattcctaaaactaataaggatataggttcaaatatatttgttatgtgtttctcactgcaaaggttttcattgagagccataaggcttgcattgcaaaggtttgatgaataaggttttaatatagaaattagtatcaaggaaattaatgacacacatttaattttgattagtgaataaatctttaatttaggtctatcttacctgctcataattactgcagtacttcactaggccatggtcatcaatcgtccactagaaaagcataaataatgcagctagtcaaagttggatgtatgtcatttatgtgacttgtgcttctttcttcgctttgtgttatttttattgtgtggtgttgagaagtgctaattattgattttcagaaattaacagcaagtactttcacaagcatctaaagccatattttactcaagggaagaagggtgaaaattgcagcctgctgtttataatagaaatagctggaagggatttccttatcttctattaacatagatttcacttctataacacagttgttacctcagcataaattaacaattattcaaaacatattgcatacttcaatttgttgaaatagatattactcaatctaagtacctagacatttcagttagatatttagaactcatttttaaacattttaaacatattgataatgagcctatttaaagccatttgaagtctcagtacagtatatctaaattactgttgcccatttatgtcaaaatcaagaatattttgttctgctgaatacgtccaataatactttattctcactttagtatactaaaagtatatgatttcaatttggaatatttataccagcacctggtaaacctgtgtctcaatgtcattccacataccaaacaaatctatttcagctttttaaaaaaatattttcccatgattaaacacttctagtgaacttataaaggccaccacttctctctcgttcctgctcctacaccaccacctccccctcaacttgttttcctcctccttcacctcctgaatcagccagcatagagtttagtttatataaacttattcaaccagggaaaatttggcagggatgtcatactgattgttctcacctgtggtaaaggatttgtggattgagtcctctacttaggtaccatttaatgattaaccccaaagtgggcaaagaaccagaaacctggaagaatccttaagcgatcatctgctaaaatcttcgcttccaggtaggcgaatccctaagtcatctagaaaagagtatttcagttctcttcctgagtatcaacaaatatttattgcaatgagactctacagcctttcctatctgcttacaatgtttatctctgaaatatttaaaatcctcagtgaaaatgccccttgcttggatataatctttttttggtcattcctaccccaacatgtagcaaaaggtaaccagcatttctctcatttgttgtgcctgaataacaatcctatttgtatcagtcaggatctcagcacattacctttcaaagcgataatgaagactccaaagaagacatacacatgaccaacaagtatgtgccagcatcattcatctttagggaaatgcaaatcaaagctgcagtgagataccacctcacacccattaggttagctactatcaaaatagaaaataacaagtgttagtgaggatgtagagaaactggaaactttgtgcaccattgataggaatataaaatgctaccactggcgtagctgctaggaaaaacaatatggcaatcgttcaaaaattaaaaatagaattccctatgacccagcaaattctacttccggatatatatccaaaagaattgagagaaagggcttcaaagagacatttgtatacctatgtccacaggagcacttttcacaatagtcaaaagtcgaggccaggcgcagtggctcacacctgtaatcccagcactttgggaggctgaggcaggcggatcacaaggtcagggatttgaaaccagcttggccaatatggtgaaactccgtctctactaaaaatacaaaaattagccgggcatggtggcaggcacctgtagtcccagctactcgggaggctgaggcaggagaatcacttgaacccgggaggcggaggttgcagtgagctgagattgcgccactgcactccagcctgggttacagagcaagactccatctcaaaaaagaaaaaaaaaaaaagttgaaagcaacccaagtgtccgtggatagatgaatggataaacaaaatgtggggtggtgtatgtgtgtgtaatgcattattagtcaaccttaaaaaggaaggaaattctgacacatgctacaacatggatgaaccttaaggacattaatactaagtgaaacaagccagtcacaaaaagacaaatcctgtatgattccacttctatgaggtatcttaacgagtcaaaatcatagagaaagaaagtggaatagtgacccccagggactagagggagtggcgagtttttgtttaataaatatagcgttttagttttagaagatgaaaagagttctggagattggttacacaatagtgtgaatgtacttaacactactgaactgtactcttaaaaatggttaagatggtaaattttgtgttatatatattctaccacaattaactttttttaaaggataatgaagagagtttaataatggttctatttacaaaggtatagacatggtaaagtggatgaacaagggaaagcgacaaggaaagggagccattcccagaatctggcaataaaagtgctcacccaacaagagctgtggccttaggtagaggagtactggccaggcactgccaaaacgggacttggcagagaggggccatataatcctgtctctgctcctgagctctgtcattggctgaacccactgggaaggtagagagcaagggagcacaggtctatggaggcgcatcttccagagccaaagaaggtgtccagctcactggtctgttccccctgggttgttcatttctctaggccaagaagacttatttaaggcttccaggcttgctcagccacaatcagctacattaaaatgcactcactcttcctacctgagttgacttatacttattttaagtggagaaattgagtgagcttgtcattgatggcactgatctgatttggacagaaaatattctggatggagcattttctctccggaggaaatgatgcttactttttcacattcatttgttaagtcagttatgtaatatcaccattataattcaacatgccaaggaggaaacagggatcagcaagaggataagtcacatcttaattctacttagatttacgctaaaagaaagaaaccaagaattaaggcaggtaactggacaaatcagaatctctctctcaaatattgtctaagtgcatctactaattaaggcaattgtggtccctttttactcggattaccaaatatttgcttaaatattctaataattttgccaggataattttagccttaatgcagttgaaggttaaaacaaaaggaaaaatatttattctcctattttgtggtttctatgaaaaactagaagcagttgaatataaaatagcattttaattttttatatagtttaatatttataaagcaagaaacaacaaagtgcagatattatttgcttgatttattttgctcctgtttttccagcattaaaaagtaatgctttatatgatcttgttttattacaacaataaaccagaagcaaaagcttatcagttaaaatgtagtctgccattaagtaacctttccttttatcatttcagacttaaaattccattgtttttgtttatttttttcctatttggcattggtagaattgcaggtggaacagaaagatgatatcaatcacatgtatttttttattttgtgtcaagcttgtattttttggtttaaaaaagagcacttttaagtattaaaagccttgtaagtaagagctatacagtgagataaacaaaatgctaaggaaactttgaaaatctttttctgttttctcaagcaaccacttttactacttttttcttgaattttctgaaaattgttagtgaatttactggtatttggacgtagtttgatattttgcattgtgggtaccataacctatagtactttataaaatgctgatttttctgaaaaacaatttaaaagtttatacagaccagggagatggatgaataggtcatttgagagcctgtattattagctccttcatgctgtttgtcatggctctgtagacctgacggcatttcatctgaaagataatactgaattacatttaccaaaaaaaaaaaaaaaaaaagcagttgtaatcattctatggagaaaaatgtaaatgggttaaatctacctgcaatgtggaaaagacaagattaacgaaagtttttgcctaccacacaccagagaaggtatggcttctgaattctggcttacttggttgccacatttaattttaccttagtaggaagtcttttatatgaataagcaaatgtgcaacacataagcacacattatatttatcgatttccttttctgaggattcaattccaggtatgtatctttattcatagaggaggtagaacttccttggaaggaaagccaaaaaggaaagaaaacaattaagagatacggaggtcaaagaaagaaggcatgtgtcacatcatagctaacacacatgcccctttgtgcacactttagaggacaccttctctaaatggatgaattacaaaaggcactcctttctctggctctccaggtagattctattacttatttgccttccaactgggcatctttgtacagggcataaacagcatacccatgcacggtggccctgacctatgagaaagaagaaagactcaagagaacttgttaagtaaggaaaaaggggactcccatgaagatgtcataatttcgtaacttagtaggtgggtcctgcagaattgtataaaggagagcctcatcagactaaggaatgggataatcaggaagtagggaggggacaaaagagaaagtgtccctaatcgaaacttttccttaatgggagctctatatacagataagcaggtaaaactgagttatgtgtcatatatgtgtttgtaacctgaaaatcatttatgctgttcagattttcttattttgttcatttgtgcataactcacttcacatttatctttacttctctgcctatacctacaaaattccatgttttagaacttcctcaaggtgttcaacctacctatttctcggtgagtcttagctggagagaaaaataaatgctaagtgcatgatgtcagttcaataaatattcagcaaacaattttataatcagtaagaatccatataacaattaaaatttaacactctttaacttaattttcatttctactttaacaattccaggtaaagaaataattattataattattttatgagacaattgagttttgatatatacaagttttattaataagttatcagtaccctaaaagattacataatgtaaatcattactttatttacagcttcgaccattacattttgggttcacaaatacttacagaaaataaatacacaaaaccattttggagaaacactttggcagtaaaactaaacttactcctaccctatgactcaccaatcccatatctaggtatagaccctccaaaaactggctgctaacctccatcaaaagacatgtacaagaatcttctaagcaactttattcacagtaacctgaaactgttaacaacccaaatatccatcaacagaattgataaattgtgttaggttaatacaggggaatactatacagcaaaagaaaaatgaacaaactaccgatacatacaacaaggttgaatcttgcagacataaagttgatcaaaaaaggcagaaacaggaaatatgtagtgtataactcaatttatcaaaaattcaagaataaaaaataattgatgataaacatcagaataattattagcttgacagggtgatggggctagatagggggaataattggctggggaggcacacaaggttaccagtatctatgtattctctcatgtacccaccacccagaccaagatatggaaccttctagttccattccaaagtcctctgtcttaatgtagatggtggttagaagaactgaaaaaatgtatatacatacatatatacattcatcaagctgtacacttaagattagtgtaccttatacacttttatcttaaaccttaaaaaatgagtaatttgaataaataaataaaagtgaatgcacataataagcttaacttcaggataccaaaatcagtgatttcttaataacattaagaaagaatattatttaagtacaagcaaatctatattttcatgttattctaccaaagtgttgtctaccaatggctgcatggtcttttgtatttgtgaaacatcaaacgttttgttagccacatttgttttaaaaaatctagtggtttaagcctattacctatgctggctttgtatgaaatatgtaagactcatgataccactgtttaagtaaaaagtcactatgatttattgattctaagatgcacaccattttcatatctcaatactccaaaatcataatgtgtcttacaatcaatcaatcatagcatattttaattgatagcatattttacttattaatagtatataaaataatggagcttctaataatggataacatagatttaatgaagttggattgatggacatttccaaagttttagtctctttccatatacattatacatgctcatgagctcacgtgttcaatgttaactcattttgggtttactggaaagtacaacagatacacaaagcaactgatatcttgtaatacaaattaaagttttcattattatattttaaaaggattcacaagccccaaagcatataagaaccagacagggaatagatgagtgacacaagccagtggcagtgcccaggtcatgtgagtggtgggcgttacaaaagggcagttgtgcaggaatgctgatgtggtattgcctgatctgcgaagtttttaagagaagccaaaaaatccaatttcttgtatgccatttactgacctgtaaattttggctcaaatagaaaccatgtctgtgagctgaatctagcccatgggatgccagtgtgtgactttgggctgaatgtaagctctttgagggcaggaatctttatctgtttcattttaccagtatcattaatatctagaatggaatctagtatgtagtaggtactcaacaaatacatgttttgtgaataaataaagttaacgttaaatctcactgacccttgcagaccaatgtatagagaaatagatacatgtagaatttttttaatgacatttctggataatatagaaggaattcatctcacagttccagtagtttctttttttttttaacttgatatatttggaaatttttaagggaaaatttctatatggtagaaaaccttttcatgctgtggacaagctaattcttacttaatcttcaaacctgagctctgtcctttttccaaaagtctctttcctaagaacctattccccttcccctctgtcactcgtctgggctcccagggcagcctgggcttgtctcccctgtgtcctgctccctaccatgtgcactgacacactcatcgtctttattttgggggctgctaacttcctgaggtcagcctggtatctgactttgtatcccttggcatagagtaagcattcaacaaatgtctgttaattgtttttgtggtattgaattgtaaaagtaaaaaattctgaagtgcttttctttttctagaccaggtttcagttttatacaaatgccctgcttctgtattcaccaaatatttttagaatctctgttaagactaagtcaccatcctgacctgcagagattcagtctgaacaaacagacatacataaataattgtgtgttaaaatctatagtaaaggagaaaaatgtgctgtgagaatatgcagggcattcattatgatttagaaggatttagatccttgcccaaggaggtgaaggatttagatccttgcccaaggttagcattcggggaggattttctcctacacagggagtagctctcagaacaactacttcattgtaacaattcatgggttgcagaatgagttctgcgtgtcaccaggcaaccctcccattcacaggacctgcacacttgacaagaaagtcattgatgacccccttaaagtgggaaaggacagaaaatcttacatggggagcaggtgaagaaagatagtaggtgctcactctcccctcaaacgttttagtaatgacaagaagtagaacttaaaggagacagcatgcttttcaagatcagaaagatctgtacatttttaaatcagagggtaaggaattactggaaggcaggactaccagatagctaaaaggtaaatattggactgagatcctttgggtcatgaaggcatgtaaagtagatcacaaggaagagggagtcagtatagtctcaaaagaaataaacgttcagtgtcgagaactgactgtcttaatgaaaggataaagttagtcacaatctcgtctttatcctgatgcctgattggggaactcttttaaatatatatgcatatgtattctgccttagtccaaaatggtcagagttgggactcactgaagagaactgcacagaagatttctagaaattttatccatttcataacattttctagtacaatgttaatactttcctttaagaaacaaaactagagtcaagcaaagcatgtttgttgactaattccttcaataaacatttaaaggctccctactaagtgcaagacactgatctagagattaaaacatgtttaattttacccccggctcctcgcccccacttgtgtcctttttctggggaagtaaaaacaggagtagtagtatctgttgttagagagacgtttagctgttcatgatacatgaagctaggtattaagcacttgctaaccagggcagcgttaacaataaaattaccacttttctttgcaaataattctcaagagttagttattaaaaatgtgaacctaaccagaaatggtctcttcccccttttataatcataaatcttgcactggggagacaaaagtaggatgtaaatgcatcatatgtgaataaaatttagttaaatagtcacacttgtgagtagacaccatgcaaataaatgtatacataaaaattggacagcacttaaagagatttaataattcatcccattgcctctgcagataaaagaaccaaagtcccatttacgcgatggctaaaatatggcagataatgatgcattcatatttaatattgctaataaatttgcaggttcgcatttttattgataaacattttcttgaaatacagtgtaggaggacagatttttaaatttaagtactttataaattagaattgtagatagcgatgagattagtggtggtgctatgtcaagagccatctaccaactcacctgtgcttctacaagcacctagctatgattttcctatttcacttttacgtgcaaccaaattgcacacaatttagggaaaaaattagcatggtagcagagtaatgatcatagtaaatatcatgcttctccttgttgacataaattacatataatatttcagaaaaagatttttgttagtctagcttaatatatggaaatattttgcctatagaatttatgtatcgaggaaatacttaagtttcttttaagatgatctctttgacacacacaagaaaggtatattgtacagtccagacagtttgagggctaaaattatttctattccttggaggctataaaatctcatttccagctacacaggctttaatgaaatattgtatagcttaggatacaggaagatttatttcttttttgggtgagttctctctaaaatttcagggaaaatttttgagaaaatgaatttataccttaaaaataatattccagaattcatcttaaaatagcatagaaagctaaaatatatttttgtaacaaaagttttgttatatttaataattctataaaatcttggtgttctttctgctgatcaccctctgaattaattggaacctataactttctgaattttattttgtataattggtagacttcatgtctcattcttttttttccccattaagattccagaagcttatttcattagagacccccacactttccttcttacaaaggactttattaaggtatatgttctgtatttagtgtggaaagtgttctttggtctttagctgcatgcatgtattcacaggttagattttccacatttaaccccagcttctgggaataagaatagtgactgggttaactgaagcatgtttggaaggagaagcaaagcttgtctacaaaatactaacacttggatgattctgcaccctgagaaaagagcacccgttgaattttctggactttttttcatggctgacttgggatacacttgcgttgtcaaagagtgtgttggcctctctctttgatgcatattgattatgacaatcaccctccttcccctgcaggccatggaggcacagatacagaactttggacagacgccatctcagttgcttattgagccacatccgcctcggagctctgccatgcacctggtaagacatatcagcatgttgagatttttttttctttcctttttacctgggaatagagcaaataaaattgtgattttaacagcatattttaaaaggcttctcgatttattggttaactcttcagcctaagtacaaactaataccccagggagagacagagaaggaagtgtaaatctacctttaagtcctacttaagctgtcccacttttggattcacaaaaatagccatcttctctatgtatgactctacataaactcattcatgcacacacaggcatagagacacacactgacaccagaattagactatatttgtaaattacaatgaaaaatgtattgcagacacaatatgatattgccaaatttcgtggcaagatacagtaggggaagtagttcatttgaataaaaggaaagaaatataaaggtaatttgtggttattacagagaggttgttgaacagagtggttaagagtaagggccccagagccggacagggcaaacaccatctctgcactagctagtaaatgacttgggcaaggtatttaacctctctgtttttgcatttcagcatcttcaaaatagaggtaaaaatagtacctactactgagaattgaatgattcaatactgtatagcacttagaccagcacctgtcatacaataagttcttaataaatgtgagctgacatcatcataattagctactggttaaacctcttattcccactttgcaagggagtcatattcttttcattttaatctgaatttaaaagtccatttccataaaaaagtttctttacagtttattagcaaatagtaaacattttcttctttaagtaatttgaagaaggtaaaatttttatgagcaatttctttagaattttttttaaaactgatttttcactatttttttactgaagtaaacaattcttgaaggtaaaaatgcgttcacaagatgaacttcaagacaacaagtactctaattttagagtaaagagctctggaatatggtccataatatatgtgtaaacaaatgtataaggtgttattttgtgatggaagtattaatcacacctttcatttactctgtcatttaacgaatttttattgagccccttctgtatgtcagatctgatgctaagcactggagatacagtgacaaataagtcctctaaactttcaagaaatcagtagtcgaacttttgggaaacacataaatgctttttgttgttgttgttttgagacagaatctcactgtcacccaggctggagtgcagtggcgcaatctcagctcactgcaaccttcgcctccctggttcaagcaattctcctgccttagcctcccgagtagccgggattacaggtgtgcgccaccacccctggctaatttttgtatttttagtaaagatggggtttcaccatgttggtcaggctagtctcaaactcctgacctcgtgatctgcctgcctcagcctcccaaagtgctgggattacaggtgtgagtcaccacgcccgacctaaatgcatttgtttttaaatttttttttaagatagggtctcactctgttgcacaggctagaatatagcgccatgatcatggctcactgcagcctcaaactcctaggctcacacgatctttcttcctcagtcttcctagtagctgggactacgggtgtgtgccaccatgcctggctaaatttttaaaattttttgtagagattgggttttgctgtgtttcccaggctggtcttgaactcctggggaccctcagtctcccaaagcgctgggaatacaggcataagccaccatgcctgcctggtgtgtgtttaaactctttttttttttttttttttttttttttaccttccttcaacagctcagccaaacagcttcagcctccttggttagtcactagtgaactcttttgactgcagttggtctttctgtgtaactaaacagaaaggtttgcaccaagctcaggctgttgccgtataaacccctcagccacattgtagacatagagatgtggcctcggagcctcaccgtttttaataaactgtccagaagaatatctctaacactttattttatgaaatgctttggcagaagagttttattcccgtgttagttttctgtgtttaataataataataaaaatatttatcctggagatatgcccagtcagaattcattactttcctagaggaagttgttagagactgaattggcatgaaactgtttataaagaaactctaagctttctaagttcatgtagcagagaattcatatatactgcaaaccattaagaaacatgtatgaaagctaaataatggttatttccagcctccctactttatgtttttaatatggtggtatttgtagtgttttgtaggacttacagtatctactttctgtcaagtcatatgctagatgttgacaaaacagacgctaaaaacagaaagaagaaaacacatggacacgtgacagggaacaacacgcactggggcctgtcatgggggtgggggtggtgggaggggagcatcaggaagaacagctaatgtatgcagggcttactaccaaggtgatgggttgatctgtgcagcaaaccaccatggcacacgtttacctatgtaacaacctgcgtgtcctgcacatgtatcctggaacttaaaataattaaaaaaaaagaagaagaagaagaaaaagcattggccctccataagctcccagcctagaagggagaaacaaggcttcaaccataaacagtcagtgccagagcagaacctggggagaactgccagggaagcgctcggctgctttatggggctactgtattttaattatttagactgtagtcatgaccccagatcaaccagatagaaatgaaagtattagtcaattcactttatatttcgtgtaaaaaatgggagtcactaatttgactaactttcccaccaaactgatttttaagctgcattgcataactgtgttacgtcatgtgggtgtgtctatgagctaacttttcacattgcattgtggtgatatttgaattgaggctggtctttaatgattctgtgtccctgtatcagtgccttcacagaattcttattctctactctctgtgccattccccagtcaaagctgctcgatttggggcagacattcaccagtatgaaagtttaggtggcttttcctccttgtgtgtgctcgtgctagccttgtctgtttaacctcattctccctagacctttcactaactatgttattccttttgtcttcctctgttctcttccctttctattcaacagtgtttccttccacagagtccgctcatgtttaaagatcagatgcaacaggatgtgataatggtgctgaagtttccttcaaattctccagtaacccatgtggcagccaacactctgccccacttgaccatccccgcagtggtgacagtgacttgcagccgactctttgcagtgaatagatggcacaacacagtaggtatgtgtgcctgagcaaatcacttactaaagatttcttaaaagctacaattaaagtaaaaaagtgtactgggactgggattagctcatatcccacattatctacaaaaaacagcagactaaataaataattgtcaaatccaactaagggacttctatctgtctccttcatttctgctgtatgttagtgcctcataggatgcttggatcatagtcaactactcagtaactatttgacaaattgaagcagttctaccaataattcaggttctcctactctattctgctattgcctaactgcaaaaaaatacacccttcttttttcctatatcaaacagaagagagtttgaatatgggtttctggatgctggcttcacatcctcttgtctctatatcagtaatttatttagcaaatatttgaatgactattatgtgtcaagtagtcccaagcactgtatatacagcaataaacaaaacaagcaccaactctatttttgcagagcttagaatctttgcaaaaagacaaaatctaaattctccagtgatttcacacttcacatgtgtttctccaaactctttcctgaaagtaccagccagtacatcttgaagcgacataacgttgtggcaaacatttagacatattgcaggagttcaagaccagcctggccaagatggtgaaaccccgtctctactaaaactacaaaaattaaccaggcacagtggcaggcacctgtaatcccagctactcgggaggctgaggcaggagaaacgcttgaacccgggcagcagaggttgcagtgagctgagatcgcgccactgcactccagcctggacgacaaagtgagactttgtctcaaaataaacaaaccaacaaatcaaaacacatttagacatatggatgcttaaccagggcagagtggatgtgaccaaatgatttagttggcccagtttaccacttgggatctcccaggaagccgaggactccccgtctccagagttgaatagctgagccatgccgaagtaacctgaatctttctattttactgacctctacattgctctaaaaaatacagtgatttatatcctagctttatctcctaagagtttctaagtgcacctattttaaggttattggtgatattatcaacgtaaggtaacgctacttccattccatcagagataggcagcacatatcttaaggaaaatatatgactgtattattctcaggagacagcctctagaaatgttttgcattgagaaaaactacaaaggactaaatttttatttaaaattgtttgaaagtgttgtatatattgtataatcacgtgtgaaaaactatgactaatgaacttcatcaagctctaaacattaatcctctgaaagtagcttttagtgagattaagattttaggtgtggcccaatttttataccttccatttacttgtcacatgttgaaaaaaaggccccattggatgggagccccagcttcctgtgtcctgccccaggtgagcgcaggctcatacccatccctgcttggaagcatagccctttcattgatttctgcttcctgtgtcctgccccaggtgagcccagcctcatacccatccctgcttggaagcatagccctttcattgatttcaggctcattgattgctcatgaccttagctttttgatgggttcaataaatgttacaatcttctatttatccagctttttctcatcattagaacagaaacaaaactcttcccagccttgtacatcgtaagtggaaacctgaagtccctgttgtgattattttgtaaggctgtctacagagacacatagtatcagaacaatttatcaaatcatttttaagcaaatatgcattttgtaaaatcatcataaaacactacccattaggaaatcccttctttctgagaattttatgttagtttttctctctttttttaatctttaggcctcagaggagctccaggatactccttggatcaagcccaccatcttcccattgaaatggatccattaataggtatgttaataaaaaagaataaattttcatggatactatccatatattcatatatagttatttttcataagatagttgaacaatattttttctaccacaagattaaaatgctaataatatcaaattatcatcaaggagctgtgtaaatcataatatgccatctaagaactttttggtattaaagcaatcgtttcttgatatttttggaggtcatttaagttggttataaataaggcaaataattccaaactgtattttctttcagcctaaagtgttctctaacagctcagtattatttaaaatataaggattcaaaaagattactaaaggctgggggaggaatagcattaggagaaatacctgatgtaaatgacaagttgatgggtgcagcaaaccaacatggcacatgtatacctatgtaacaaacctgcacattgtgcacatgtaccccagaacttaaatttaaaaaaaaaaaaaaaaagggccgggcatggtggctcactcctgtaatcccagtactttgggagtccaagacgggcggatcacgaggtcaggagatcgagaccatcctggctaacacggtgaaaccccgtctctactaaaaatataaaaaaattagccaggcgcggtggcgggcacctgtagtcccagctactcgggaggctgagggaggagaatggcgtgaacctgggaggcggagcttgcagtgagccaagatggcaccactgcactccagcctgggtgacagagcgagactccatctcaaaaaaaaaaaaggaagctaatattgaagaacatcttttctggcagtcttttttttttttttttttttttttgaggcggagtctcgctctgtcgcccaggctggagtacagtggcgcgatctcggctcactgcaacctccgcctcccgggttcacgccattctcctgcctcagcctcccgagtagctgggattacaggcgcccgccaccgcgcccggctaatttttggtatttttagtggagtcagggtttcaccgtgttagccaggatggtctcgatctcctgacctcgtgatctgcccatctctgcctcccaaagtgctgggattacaggcgtgagccaccgcgcccggccacctctggcagtctttatcactgaatttttttaaactgacatgttgtaaagcaaatgtttcatatgaattgcaaactgatgagctataactctttgcagcagacattcaaaatatttttaaataatcgtgtacatatttattagccattggatccagagctagcatcttagtctttcgaggcccttccggtttcatatatgtaagacagtttttaataatgtttgttctatctgtatcactggatgattagtaagataaattagaaaaaaattgaaaatgctacgaaaaattattaagctacatattaaagtcaaggtgttttattcttgggttcttttttttttttttttttttgagatggagtctcattatgtcacccaggctggagtgcagtgatgcaatctcagaccactgcaacctccgcctcccaggttaaaccaattcccccacctcagcctcctgagtagctgggattacaggcgtgcaccaccacgcctgtctaatttttgtatttttagtagagacagggtttcaccgtgttggccaggctggtctcgaactcctgaccttaagtgatctgcctgcctggccctcccagagtcctgggattacagacgtgagccaccacgcgcagcctcttattcttagattcaaattcatccttcgtctttgaacctggaaataagataagatacagacgtttcaattagttacttatacccatacacaaaataccatttacatgtctttgggagcttataagctttaggattaagaatattattagtctagtctagctatttctctttccagtagacattgacaatgaaatatacagctagtgtgtaaccatggaaaaattaataggtctattctaattagtaaaggaccaactgtatagttttcaagtggcctgggacccttggtcttcttgtccttactgacttttgtgtataatatttttattgcttatgtttcttagtaattatttttatactgttagtagatatctacagatagtagtacttaatatttaactggtgttagagagtggtggtgaccttctacatctgcatttctgtttaagaattcagcccagtgatttatcctgaaaggatggtgcgcagtaagggacaggctggcatgcagacaggcactggggaaatcagatggtgtctctgagttcctgactttattcagattcaatcccagggctctgcactgattctttgcctgtctctttcctccccagtccctctctcatcttttttgttcctctcctcccctgctagccctttctggaaaggccttctgtctgttgacaatccaggcctgtaaagctgctgacctgaagctccctgtggggctgcccacgtaacaacatcccttgctcaaatctctaccctcctttttcacaggaattataaataccatctgaaaatgacagacttggggcaaatattaatatatctcttccttaataacatacttcatacaatatttagttttcatgtgattcttataaactaatgaacttgtatatagtgaacatctaaagaattaaatgcattaaaatattgtattatgttttaaattaattgtcttgaattcctcatattgtttttattggtggagggagaactaaaatttctggcataattttaaaatacataatgtggttcataaataattactgcgaaggaaatttatattcctcaagggagaatcttaataatctcataccattaaaaaaactatttctggataaatgaagcatgaaagtattgttttccttctttgagtgcttggcaaaactcatatggaatctttcttcaaatgcttttttccatttacttttagccaataattcaggtgtaaacaaacggcagatcacagacctcgttgaccagagtatacaaatcaatgcacattgttttgtggtaacagcagataatcgctatattcttatctgtggattctgggataagagcttcagagtttattctacagaaacaggtaatcctaactatgaaacaccatattctcttcaaaatgactattgttaaaaccaaagctgaatatgaaatcatacttaatgtaggcatttttatcatttgccaacttgagtagtcaagattcaaattaaatgttcacattgtaagcaaagtaactaactataacttcatgtattccgaacgttagcatgatcccagaattcataggacaaatggggctattgttcctttcccacaaattcatatgcagtaaaagatcctaaaactccccttggtctggcccaaaccctgaagagaaaaatcgtgattgtgttattttataaagtcttttctttaaaaatctcaagtgacattcttgtatcagtttccaaaagcaatgcaagaaagcaacctgtagccagatttgaataacattgtaactttgtcagcccatagatgaacttttcacaaaactggtaaaataaaattaaaaatatggtaaaattttttaaaaaatctgataaagttacacttattaccatttgaagaaaaagactaaatgaagcaaacctgtcatttctgtgttgcagggaaattgactcagattgtatttggccattgggatgtggtcacttgcttggccaggtccgagtcatacattggtggggactgctacatcgtgtccggatctcgagatgccaccctgctgctctggtactggagtgggcggcaccatatcataggagacaaccctaacagcagtgagtgtttgtatcaaatttgtcctatcaaactatagtttatttaaatatattttgcctttttgattttcctaatagttttttcctgaggtgtaaggattttaaaatatgaaagcttaagtggccaaaatctgtactggaacgtagctatgttcaaagtgttaaaatgatcagtactatcacctacaacatggagagacttccagatcccctcaccagtcccctacccagaccctctgctcagcagcccagtcaccaaatgtccccatccttcagaaattttcttcagcttcaccttatccattaaacctcatattatttctttcagctgaaaataatctctccctgctctgaatttttagaagattttgcctgtgtctcattcagggcactaactgctatctaccatatatactgtagtaaatttctccatttattcgtttagcaaacagtgagtgagtacccccttcacatgaggcattgtgggagatgcaaaaactgaataagacagtttccttgcttgggaggattcctcaagtgatagttattccacagtgcaccctaagatatcccataggaagaaagcgttgggagaggctggactccttcgtgaaataattttggagtacagtgtttatactcaaactttctacataagctctgaaagtcttacacaaataaatttgttgatgcttgtttaatccgcagcctctcaaacttctttttccaatgaaacttttatttatgtaagagaagttagttattagttgttggactgctgccccaagaaaacactaaagtagataatgagtgtctgtctttccatcttcagttcctgtcatagtaatatacataataggtttccaataaattaaatgactgaagagctggataagagattggctagaaataattactgcttttaattactaagctttcaatagttcactcaaatgcatgactttcctgtataatatagaaaggtttctgtgaagtgataatggcaagtactcaaaccaggattattcaaattgtcacagcttacacagcactccaaaataaactgaaacatgaatttggggaatacttataacccaacagagataaaaatttttcaggaaacctgtgcatctacaactaaaatactataagagtagataagaaatctacaagatgccatgttacattgcgtggctggctgctgcctctctggttagttccaacctgtgagacagctaggggtggaaactgaattgcacatccacccttcatgtcccactccatccccccaacccttatgcattttgacaggaataccgcaaaaataggaaatggctttggatggataagaacaaaggccccatcatagtacaggagagaatggagaaatacatttgtatgagaagatagtggaagattggattagatgtccaaatgttatgtgaagttttattcctgttgcccatagctagagttgaacagtggatgaagaaactaggtgtgttgtaaaatagcatatgcctcttggcatagctactgaacaagagagtgtctattgtacatacgagtctctgttctaaatttgaacaagatgtgatctttatttgagggaaaagatattcaatgttgcttgatttccaaccagttcaaataattagttaccaattctgttattaacaaacattatgctctaaataccagtaagataatctccctatttactcttttgtaaagccatgtccgtaaacaattcatttttaacagaattctagtatgcctatgtatgcgtatgtgtacatgtgtataagacatatgacctaccagcgatggctttattattctcaagaatggtacattatcaagtatattttatctaaatatatgttcacatatttccaaattgtctttatttccataatagtgtagcatttctttaaaaagtttaattaagcagcaggtctgtgtagtatctttcatatacattgataaaaattagaacttgttagaaaaaatttaaaagaaacagaatagagctttaaatctaattaattaccgtcttcaaaatgaagcccagaaatgatgcaagtgttatttccaaaaaggggatttatttcttaaaagctgccatctggtagctgagataagatgttttatataatatactgctaggaggtaaagaatattaaagaaaaatattaaattatagtaattatctatgttcactactgtgttttctaatgatctcttaaaccaaaagatggctaactatcaattgtagctttggtacatcagttagcaagaaaagttaaatacaataatatttaaattatttaaagctccttacaacaggagctgtgtaaatacaaaatgcttttttaattcttaagaacaaaaatatggatattatatttgttaaaaagcagtgtcatattttagttttaagtaaggacaagattatcttaaagatattatgacaaaattatcaatatgtatttttcagtattacctccatctataggaatttatttttagtgaaaagctgttgtcatcattatgaacctaaaccacttccatagaatccatcctgtcaagactttattagatatttaatgtgaacatacgtagtatggtacattaataaaagggaaaagtgctcttctagaataaacaagataagcacctaaagtattagtcaagcaacagtatgtgttgggtgcctactgtgtgcctactgtgagcctggtactatcccagcagctgggaatgctgcaaagtcacaacctctgactttctagagtttacaagaatctacttttatactgatcacaaactgtttctcctgcttggatatactgaggatgtcaagtatttgttaaatgaatcatgaattgttatccgataatattttgtaccatactttaaggattcgtaaaatgcttaactttacatcaaattgatgattatgaaaaaaactggttttagcttttttccataaggatgatcacagtagtaaaaaagtgatctcaggtttagtattgattgactgactgatttgtgacccacttatctatttaaaaagctaacctagtagcatatatatgcctgactagggcaaccatctgtgtcggtctcttcactcttttttcaggcagtcacagcacacactgaattgactgccatatcagtgccctgcctgtggtttgacatagacatagttgttgccatcagaaaactcacaatgtgaaagagattttcttctgttccagtttaatctactctagcttccaattcacaggtcagagaagcaggccatatgtgttttctatctcataatacattgatactcaagaccagaaagctagttatgtctaaatttgtattaaagtgtgtgacacaatgcccttaggttttggaggttgtatgtattaacctatccttgacgtgggaagtcctggcatgtaacataatatcctagtagctgttataatgaagggattggccttggtgtggacatggaactgctttgtgtgtcaccgaggccaaatcacacctgttcatcacaacatcatgaaatgataggatttatcatttaacctttacatgcatatcactaaaatcttctcaagataaaattcaactgactttaacatatttgtttctcttgcattgtcattattatattgtaatagatagctctattaattccacgaagaaaaaatgtcatgtttgtgaaatctttttggcaggtatagaaagtatgtatggttttattgtgtcaaatatattgtgaagaatgcagacatctcagaaatattagtctttttctaatcattttgaccattgtgatgaattggtcacaaagataatgaatatttgtaagcagactatcagatatagagtctcagaccataaaagagataagcaaagtctacctagtgcaggttagagttgaattatcattgctttattaatgtattttataatattattcattgttattctttcaaactcgcggctttgaacgtataaattatcttggagactttaaataggtccctaactagataacagaattgcaaagatgtgaaggacagatgctttcatccgaaacagacttttacacaaattctgaaactaatttggaagtgataaaaattaatttgcgcactttaattggaagcagcctactgcatgaaagagagcagagcagagcaggcaatttgtgctaaaagctgattgaattttttgtcaggtaggtatcttggacttggccgcttatcctcttgagcctctctttgcaatatattacaacccatctctgactggtgttctttaaaaggatcaatggtattcctttggaatccctagagtccaaaatttcattgatcttaggacttgacatttctcattacgtgctgtagcttccaacaagatagtcacaatagaggcaagttaacattgttgtctcttcaacagacactcaaaatacattgggacttcagctcaaaagccaatctgcttttaaagaatgtagttttaatgtttataccacatacaaggtgctttatagagagtttgatatacatacatacaaaaatttttaaatcatagccatgtgaaactttgaaagaggatttaccgttcatcttttcaactcaaatctacaaatattcattgggtagtttgtataacacattgttattatgcttttctattccactttttaaaaataagtattttagctcgtgtacgggcattatgcagactgtcaaaggagaagccaattgcaaaggagactccagctgtgcacacacaccttctctgggctcccattgtgtatgcctcagctctggacgctgaccctcctgccagccacaacctgtcaccaaacatctgccaaatcacatccctctctttgttggcatccaggcttcttttaaaaagactatcctggtgcccagctccacaactgccactaaccagtgctattataagaaatgaaagcatggccgatggatagcccagagagatttgtagagtatatttagatttagatacattaaacaagtttgtatcacttctcggagcaaagaatcttagctaggatttagcatatgttaaaccatctttgtaagatcagaggaagtgtagctccatatgcaatagttctcaccttgcagggctttttgaggaccaaatggtaatggatgtattggaacatcgatggcacagagtccattctgcagtagaccactcatccaccccatcccctcattctaacaccagtagactttccagggttccagactgagaagggagctgcttgctactcggcctcggcttttcctttccttttatgggactaaggcttcaagaaaggtctttggcctagattggaagcaatatatacagagtgactaatgtgttctgatcagagagcttcaggttccaaccagggggtgtctgggctttacgcagagcccagcttcctgaggaaggggaggtggatgatactattagttgtttttaggtgagcgtaggacagtaatgtactgtgacctagatctgggctcaggacttcaagagaagaggttgtcctgcagtggcagtgctcagaggaaaatgtagtcattgttatctctgaagaggaaaaagaagttagaatgaatgaataaataatttcaccgtatctgtcttccattcttcactgaatactctatgagtacataaggaaatgaaaccacatcatgggtgaatttgacattttccaacccacagaatgtttttacttgcattatcttgggaccttgggaaatgcgggtccaagtgtatttgatacttggaacagacctccacagcacctgcctgtggctgaggagttggggtcttgataagggactcctgaccgataccgctcttctcagctattccagcaaatttctaacataatatgttgaaataaatcttgaaatcatagtagtaatgaaactaccataccctttgactaaatcccttattctgggattttaactttcaaaactccatcatattttatctaagtataaacatgaataaaaatatcttctgccatgattctgcagtgacttccccagggtcagaaataaaatctgaatcagattttatcaggaggttcatcctctcactgtgcagcggaggtcttagaaactccactggctttgtttagttctaaatcagaaagaccacagcttcccctgcatatcagtgtcccacaaatgaggtttaaaataagaaccatgagttctttactttggccatttctctaaaagccagagaccatctcactaaaaaacctctcctgtctatgtgaataagcagcatctaatactagtatatttttttatcatccattttgagaatattgaaatgacctttgataaaaggaggatggaatttgtttattttaagccttttaatattcggagtttccaaatgcatgtctataaggaatctaaaaattggacgtgtttgttcttcatcagttctagtcattccagcacacggtgagtgcttctgtggaggcagtggtgggcctgagggcaacggcggtggccctcagaggggcggtccacctgcacctccctctgcactgggccctttaaccctgggctacatccatcaactgtgatgtgacagtgacagaatattcctaggattttgaatgattgttggggtgtgtgacatctgtccctagcaacgaaatgaaatataggaaacaagctttcccgccgctgcaggtttcccaactcagaaagcctggaatggcattttatttgcctttcacttaaagaaggaaacagtgctttcaggggccctaaaaaataccccctaatagttaagttccacagtttattcagatgatctggggaaatcgtaatgaaaaaaataaaatattttaaactctctaaatcagacatgagcctttgaaaaactcatttcctagcagaaaatgtataacatgcataaggaatatttttatacattttttttctcaattccctgcaataggatcagattgctttttattttttctatagcatattagggaaaggtcccaaaactattcattttatataaatgaattaagtgtataatttcagggttttccagtgtgctagtctctccaagataaaattatcatttagaaaaattaaacctgatattacacataaaatcttacaaatacttttttagagatttaatttttatggatacataatagttgtacatattgatgggatatgttatacaaggatacaatgtgtaatgatcaaattggggtaattaggatatccaacacctcagacattcatcacttctttgcattaggaacattctaaatcttctcttctagttattttgaaatgtacaataaattattagccgtagtcaccctattttgctaccaaacactagattttattccttctgcctaactttatctatctaactgtattgttctacccattaaccaacaccttcccaccacccttgccagcctctggtaaccactattctgtttatttcctctgtgagatcaatttcttcagctcccacatatgagtaagaagatgggacagttgtctttctgtgcctggctaatttcacttaacctcatgtccttcagttccatctatgttgttgcaaatgacaggatttctttttttttatagcagaataatattcaattatgtaaatatatctcattttctttatcttttcattatttgttggacacttaggttgattctatatctgagctattgtgaatagtgctgcagtcaacacaggggtgcagatatctctgatttgctgatttcctttgtttggaaaactcttatcaatgcttaaagcttattttaccaggaagcccagggcatctttgaaacaatttttttttctttttcacctttttcctgcagtgtgaaacataattttataaattatataaatatgtttcagacaaatccaggactgctgacattataaatggacactctaccaatagtcaaaacacattatagcaatatccatgtattcagaagaagatggcaaactagcatgagctgctgtcccccttctcccacactccatctaagagatgcctcaaaaacaaaattggagctgatgggtctgagaaaatgcaaataaaacggagaaatccttggggagacagaagataggcaggtcttaagagaagataggcaggtcttaaggaaggggctcttggccgaccagagtggaagatgtgggtcgtcttactgggtaaggccttgtgattatgcactttcctcatgaactctctgtggcttccctcttgccactgtgggcagagaactggagcagcagtccagctagccagcacccagaggtcccataagtgccaaagaaggggctattcagggggaggtgcatctgccagccctggaacatttaacttcccccaaccccagtgagggccagtagttcaacctaggaggcagctctaggaaagaggggcaccaagaccaaagtacagagtggttctctgagagacaagataggggatcgggggtggttaccccaccaaaaataggaattcacaaaggaaaacaggcaagcatgcaaagaacacaagtgctagaaaagaaagaccgcaaacagaacaacctatatgggtgatgcagaataagctcatttctttctgataaaagaagagaaaaatatagaactttttacaaaaggcataacattctctaagtccttcaatttatgaaagcagttagcagtgaaaatgcttctgggatataattcagctggactttttagctaggttcgcactaataaagtgaagtaggttcaattccaacccttagctgtatgaacttgggcaagttgaatcaccttgcaaagccttgggtgtctaggctatagactagggatagtaagagttcctacctcatagagcatgaccataaatacatgatgtaacacagataaatgccttagcaggcattgtacctgtttcataacaataatggaagaaaaagaatagccattaccactctcgttacgttctaagcatgttacatacgttaacttgtcctgtcatctaaacagcatgtataatagattcgctagttatgcgcatttcacaaaagaggagagcagagaggttaagtaactggctcatggtcacacagcttaataataatgcccttaataaacatgggtattttttgaatattgcattgctggtgtagctctctccccctgctattggtctgtagtgcctcactgctgctgttttcttgcaggtgactatccggcaccaagagccgtcctcacaggccatgaccatgaagttgtctgtgtttctgtctgtgcagaacttgggcttgttatcagtggtgctaaaggtcagaagtcatttctttcattttcaatgtctagaagatgactgttttctcacactaagcgtgattgtcagtttatttcttccaggaagcttcccatagacaaatggtatcccaaagttatttgtagatgtttagttttatgattaatatttactggcactaatataaaatatgtataaaattttatgtagtattttgtggtcaacagtgttctaagcagaacactgataaattacagtgtattcttatgatgcagccattgtaaaggacatgtaaaagacaaggggaaagtatccctgatgtagtgggggaggtggggggtcatgtcactcatcagacacggcctaggatcccctccctcttcaagtccctttctttataaggccaggggctgtgtagaggttggtggaaaggaaacaaagattacttggttctttggaggttttgttttgtttttgaggcataccttcactcttgtcacgcaggctggggtgcaatggtgcaatccaggctccctgcaacttccgcctcctgggttcaggtgattctcctgcctcaccctccctagtagctgggattacaggcgcccgcaaccaagcctggctaattttttgtattttcagtagagatggggtttcaccatgttggccaggctggtctttaactcctgacctcaggtgatccacccacctcagcctcccaaattgctgggattacaggcgtgagccaccacacccagcctctttggagtttttgtagaagatctttcatttcaggaagtcaggaaacttaggtcctagttctggctcaaatagcagttctctgtgggaagactcccaggcagaaaggagcctgatgcttggagaaactgaaaggagccctgggtgctgctggagtatcaccgtggtgccacaacctggaggaatgagaaggctgaagggatgggaggggcctggggcacaagcatttgcaatttttttttaaatgagtatagtaggaaactattgaagttttttaatcgaggtgatgagatagataggtttggttgttagagctcatttcagcctttctacggagaatggatagagtctgaaggctggcaccatgtttttaaaattttggtatctaagaataaataacccagaaatggacacataggatattttcagtcttttaattttaaaaagtaataatatgtgtaatatcattttaccctgtgaagttaaaaaaaaaaaaaaaaaggaaaataagtgacacatagtaggcgccaagaaagagacatttcctgcaggggctgtgtgatattagagatgattgctggtgttttcctaattttctatagggcaagtctattactttagtaatcaggacaaaatttaatcatgtcacttgctttgtaaaatatgtgtctattcagctcaattaaaaataaacacgtaattcatacattgttttgtggaaatctttttgggacaagggaatagatatataacaccaaactatagtgaccaatttttatgaattgatcagtgaattttttactttatcaacactattttataagggcaaaaaaacccagaaaccatcagagccaaatgtcactccttaccctcctttcacactcttgcctcactattcatttatttgaaagacaaaatatctttctgtaggctgaaatacttaagttttctcaattttgcttttacattttatgcgtatggatgacagaaaaaggtaaaatgtacttgacggcagtgtattgatgtggtacaacgcgtaaaattttgatgctacttgagaaaatgagcagctgttctgataattctattaaactttcaagaaaagtttctaaaagcgtattaagagaaaatgtctggcacataaagtcttttattgtcacgtaatctgtgagctgtaccattttactatgaatattacctgacaaaggaaaagaccaagtatctacctggtgaagaagcgtgcggcgtaggagtgtgatatgtagcaggtactctggctttgctctgtttaaatgtagcatcagcgcttggcctggccagcctacctctttcctgtcctcttccgtcacatctgagcgcacacccagcaaggttttcaggttggtgggagctagtatgtcgtttgtcgtccccaactgaccctggcattgatgtccccactttgcagagggcccttgccttgtccacaccatcactggagatttgctgagagcccttgaaggaccagaaaactgcttattcccacgcttgatatctgtctccagcgaaggccactgtatcatatactatgaacgagggcgattcagtaatttcagcattaatgggaaacttttggctcaaatggagatcaatgattcaacacgggtaaatctgcatagttcgtgctaagtaggactgaagccaagagattaaagattgattgttttacattaaataattcataatagaatgtctgtgctatccagataaatgtgttctagattaaaagtatataacttcttgcggactggtactttaaagaaacccaaagttcatttaattgcaagtaattaactcactgcattagacttcagaaatgatagctgttgtttgattaaagcttagaacctcgggagggtttttaaagctccttttataattgtttcagtgctgcaccctcacaacattaaaagtgagtttattttcaaagatttctatctctagaaccctaaacaaaaattacatatacccatttgcccttcattcatgaataaattataattgctgggttgtcattattaaacactgttttgaaatatgtttcttccatttgttctttaattctctataatattaatattcaagatttaactaaacatgttacttaatgctcaaattcttcctggattaaattgataatattctcttgggaatttaatcttggttttaataagatcttttgtatatgtaagaacttcgatgaattccacaatggaaattctgtggattgaacttgattttgttggacaaatgactgacagtaggcaataatgataagggaactgtactgagtacttttcagtagtgacagttggctatttaggaaaaattgagagaaatggttgttgtgtattttattttattttgtttttttttgtttgtttgttttaccttttctgaaggccattctcctgagcagtgacggccagaacctggtcaccggaggggacaatggggtagtagaggtctggcaggcctgtgacttcaagcaactgtacatttaccctggatgtgatgctggcattagagcaatggacttgtcccatgaccagaggtgagctgcgtcaaggacaagtatcatcactgagaactgtcattgaaggctctcttcattctaccaagggtgaattgtgctgtgagtgcaattccagcatccaaatgaaagaaagactggcaaagaaaaggggaaaatgaggggaagagtaaggattctagtgagagggaaacagaggaagagaataagaaggaaaaaaagaaaaggatctgatgaagaacaggtgcctgcagacatgttttaagggcccaagacatagaacttactcccaccaagttccctgttctcaggttcctgcctagtctcagacaggccaccctggcttatatgatgtgagggaaacacgtatttttcagcagaggtgggattcagtgtgagacctacttcttgctaaccagtttccagcaaagtgcatagtgtgggccgtagctggcccccctttcaacagcatgcggcactcacgcattacccagaacaatttttttacccccatgttcttatttacctgtttctcatttatgttattttgttttattgtatgtatttccttaaaacacgttaatcctttaatccagctctttcttggaaagagttgatatggatgttaatcaattaataatgattttccattgttcctcaatttgcaataggattttattatttcctgaaatttacctttgggtttcttacaaagtgaaaataatattagaaatataaagtctaaagttcctaagcctttaaaataaactacaaccctgtaatctgaatatggcatgtgatttctaatttttgctatttaacagaaataagaaaagcttgttaatcaacgtttttcccaactacatgtaatattcctcataacagtattggttttaaaatattttaaatattaagacataataaagttaacaaagcatcttcacaatataataaaatggcactgaagtcatcaggaaaaacgctgtaagctaatttagtctgggaaaggatgtttggtctgcagcccagactgtttttaaagaaggtttaaggttattattggagtatcccaaagtgctgcagcccatacttaggaataaatgggaatggtttgttgtgttactatttgtatatatgtgtgtttccagagtgtttgaaatgatttgtgtttgtaagcagtttcaatatttccctgatattcttactcgttcgtgtattcattttgctgccatcatcataggttgagtgcagtgcaaagtactaaggatccacaacaagaaactgaccccagagagctcagatcctcataatcattgcatatgagggcaccaggaacagactaacagaagaaggaagggatgaactcttcttgagggctgggaagggcaggaaagaccttagaagaggctcatccattcaccaggcatgaacagacagggtggatggaagagcatattcaaagttgcagtagtattagggggtctcaatggaggggggaaagatactaagtttctatttctattttaacctcatccttggttttgattattttgttgttttataatgaatagtgcatgcatatcaattataaactgataaacatatattggggatattactcaaaaggtatttattggatgaggtgtctaatcaaaagtgaagcaacactttatgtagacagaaatcctgaaacctgagttcagtcagtggcagtgggactggggaggaatatccctgaaaaagaagcctcagagctgaacagctgatcagttaggagggagagggagaggagacaaggtgacttaaccagcaaaagaccagcaaggtcagaaggtaccagtgattcatggtggacatgttgaatctgagggttttgtgacacagcctggcagtgacctccacttggcaatgggaaatcagcatctggggcttcagaatgagacgtcgttgcctttacgtccagggagactgtggaccgagaggacaagaggtggagtgattcaagggggcaaagaaaagaaaggtcacagagataggaagagatgccagatatcctcagagaagccaatagatgcccaaaacaaggcagcggacaggcacgtgtgtgattgctgagagaaatggggcacccagcggaggctggaaatgtggttccgtgggcccctcacgctctgcagcagggctggctgtccaggtgtgtgcgggctaactgtgctcctctcagcagaaccaagaagaaatttcagtcctacttccatgaatacaaaattaagacttggcaaaccttgagatcgtgatattgtctagtgtaaaatgccaaactttgagatactgtctagtgtaaaatagcaaccacagaaatgattttatatcactcttaactgctgtttctgcttttccaggactctgatcactggcatggcttctggtagcattgtagcttttaatatagattttaatcggtggcattatgagcatcagaacagatactgaagataaaggaagaaccaaaagccaagttaaagctgagagcacaagtgctgcatggaaaggcaatatctctggtggaaaaaactcgtctacatcgacctccgtttgtacattccatcacacccagcaatagctgtacattgtagtcagcaaccattttactttgtgtgttttttcacgactgaacaccagctgctatcaagcaagcttatatcatgtaaattatatgaattaggagatgttttggtaattatttcatatattgttgtttattgagaaaaggttgtaggatgtgtcacaagagacttttgacaattctgaggaaccttgtgtccagttgttacaaagtttaagctttgaacctaacctgcatcccatttccagcctcttttcaagctgagaaaaaaaaaaaaaaacacgtttgatactttgtacatcagatgcatcttatttaaaagggatacttttgtaaaagtaaaaccttgtataaagaacaaaatgtttcttaattttattgtggagttacaacttgcatgttccttactcctgttggcttgatggaacaggtgcattcacactatgaaacagaaagatctgtccaaggacacagcttgtatgaaagggttgaatttgggctccatcagtaatttttgacattttcaccaaaatatagtttgcactttttaatctaaagtcatcccttctgagtgaaatttgctcataaagcatttggatactaagccattatttgccattttgggtactttatacaaagaaaattcagccctaccctgcataatttgaagacacagcagaaagggggcttagggatgaggtcctggtttttcttgtataaataggagtcatgggcgttagttctgtagtaataacttcccagcacctggacatctcttccagagttatcccactggcttggtgtgtatacattaggggaggataatctgatgctaactttttttttctctttggttcttgaatagcttagtttctttaataacaagtcaaactttattacaacaataactgaagttattcttttaggttctcgtgaaattctcactgaaagccacattcttagcctaaggcatttcatcttttatgatataaaatgatggctatcaaatgattttccatacattgtactgatcaagttatacacccaggggtatatacactttcttcatgtttcttctttgtatatttggtgactgtatcgtcatagatgtacatattgtgtcggtagggctatgaggcatgttacaggaatgtaattttctcagaatttacactcactcgcagtcatttatttaaaaagataaaacaagataatgggttctttgtattggcactttgcaccagaaacatatcattatttattgatgtgattacttatttgttatccaccttgtactagtaagttttagcactgaattccttcttcactgttgtttgtatttatgaaattctgaaattatggggaatcagcgtaatgattaagttattcatcaccaggctgtaagcaatatcttgagtttgtagcttagaattgggaggatacttaacatctggaagacaagttcatttcatcttgagatcatggtgaaatattttggatatataaattccttaagctattgtaaccatgttttattgcaaagatgtaaaatatgccagatgtgtgtgagttggaaatcaaaaaaagaaaaataaaatatgcaaagaattcaccgactgtttcagatttcattggacatgtcactagcatgctttcattgtgttgtcatacaggtttccgaagtcatcatcatctgatgtagagcctacagcatctaaaaacatgaaatcgagtcctaatgaggttctgcaatttgctgaaacctgagctgctctgccgagccatctggcagggatctggggcaacagcgaccatggggaaacggccctcattgtctattctgcataatccactttggggattgtctttattttatttaaaaggaactaagtagtgaaggttataataactccttttttgagtgttatcacataatgcctttttcatttgaaaccacaccttctagaacccatcagtgaccaggcatggcacaggcagggaccgaggacctggagaggctgagcagctgctagcaagggcagccacgagtgggctgagggggattcggtcacacagattggcatgggtggtagcaagggcagccacgagtgggctgagggggattcggtcacacagattggcatgggtggttggggcagcggcccagacaggcccagagaatgacagaactgcaggccgtgcttccatccgcattcccgagactaaagggacagacccaacagtagcctaaggaaggtttgcgctcttactttccatcctatccccaaaccagaaatctgtcagtcatctgccctgctggctccctcacccagccctcctgccaggcactccagccaactgactgatcactacctaaagtgtcttttgaaactgcccctgccctttccagcactgtcatctggactgtccgaaaacctcctgacctctgacctgtcccctcccatccatgctccgccctgctgcgaaggcacccatccagtcatctccctccctgccgccccgcgcccccctagtgccccccagcgccccccagaaccccccagcactttgaaaaaccaataccaatggcttaaaatggtattcttaaactctggtgggttgaaaatcacctggggagcttatttttaaaagcaggatctagagtcccaccgctcccccctcccaccccaagcacttcttgggcacattttcaacaacactgattggagggataaattctaagctcagtgaagcgaagtccttcaggaaccacccccagcagccagcacccctagtaaaccagcctttttccaagttcctgagaactctcttgcacctgagtccctaaggctcctcctgccaggcggcccctctctgcctgcaccactcgcctactgccttgtcgcagattgacctaaaccaatttggtcatgcacagtcttttttggcaggtaaaggtagcccccaaaacaccacatcttcactatttcatgatgaaaacaacttttagaaacagtttctgctatgtgtggggatacctttttttttttttttaattgagacagagtatcactctgttgcccaggctggagagcagtggcggaataatctcggctcactgcaaccgccgcctcctgggttcaagcaactcttccagctcagcctcccaagtagctgggattacaggcacgcatcaccatgcccagctaattttttttgttcttagtagagatgggtttcgccatgttggccaggctggtcttgaacttctgacctcaagtgatctgcccacctcagcctcccaaagtgctgggactacaggcgtgagccactgcgcccggccggtatacttttaaatgaaacacattttagcaagcaggcaaaagagtgcctgcaactcttctgtgagtttggtgaagtccagagcttggcttttttacgtgatctcaaaatcattttacatttccaaaggtacacttgaagcagatgcactaatattctagaagtagcatcccatgagccttgtaatgccatcagcagcctcaatcctccaacccaatcatcaagccatcaagctctgggcaccaccctaagagtatgtgctaaaagcctcattagattgttaaaccctggttatagagaggtaggaaaagttcaaatactttagccagcatatactgaatttatatgtatatttagcatcattaattccatcaacaaaagaacatttctatcatccattgaactaatttagaagccaataatttcccctgctgcaaagccatttctagtatttactaccctaactcatagagcttccagtttattcaggattaggaagctggattgttggaatgacacctttctgaaatgtatatttctgatcagggcaactgactatccctagaacgcagtataaattaacacatcacatgtctatactggatattttaaagtaaattacaacatcataacattcctacttactcttacaggctccccactctgggatgtcttccctgaccactggcttagcctcctcacccctggtggtgggcctggcacagccctgagcagtgcattattgtaactcacatgtctttcctccatgtggctatgagcttcatgggcaacacgaagcttatgtccttaaagcagtgttggattcagagtagattctcaacaaatgtgatttgcggaatgtatagataagcagacagataccacgtccctaagcaaaatgacaaagttggctgggacggtccagagcccccaaacttccctcttctcattgtcccagggccccacagcctcatgtcaccctctcccagcctgcatgacagtgcccgccagggaacctcctgctccaagtaccacctcagttgtgggcctattccatcaaagttcagagaatcaatttccaataagcaccaaaagagggaatattttaagattttaattactgctcttgacccacattcatttagtgggaagaaaaaggagctgacagatgatctggggtaagagcttctggtattgcagcccattcaagctgcctaagaacaaaatccaataactgggctcttcactctgagaataacttgttggctccctcatcagttaaaacaggcacaatagctacgttaagtattgttttgagtatcaaaatacagagcatataccaagcacctagtaaagcacctggctccccgcagagttcagcagatggtcattgcctcccaccatctggtgagcatggattatcctcatctgctcagcatccctttccctatttacctgctatggatcttcctgtgggaaacttctcctctcttcatcatgggatttagtaggactgccggttgtaccaccggatccctggaacttcctggactcaggcctggccaaccatgtcaccttcatttctgggacctcgatgattggtcagggttagacatgacctgagttgggccaatgagaacccttttgaaattttttatattttgaagtcagaaagaaaagtctctttcttccagagtcactaacctgtcaataagaaatcggggactactagcaaccctgttctctgttgtagagaagacctgtttgcaataggtaagaataaagccacgagaaatgaaagagcatgtgcacttgtatgccagccacaagtttctgggaacctaaattgccctcatatttacagatgtcccaattctggatgtttgctttagtcaatgaccaataaacacttttctctcccccttacattgatcgaagctgtatttagtttgtttatttatttatttttagtacttgagatcaaatcaaataacccttaagagatacagctccctgccccctgctctccacccttgcttagaaaaatgtaacatattccaaatttggtaggaaactaagcatattcctagcctatgtatgatgccataatcccacatttacatatagttccaacataaatgctttttccatccatcaacacacatggaaaagaatgctcttgtcaactttgttcctaataaccaaatatacctgttgagttttttaaaaatccagacactgatatatgctgttaggaatcagaacggtggttacttctgaccagaggtagtgactggtaagggccagagggggtttgggggtactggaatgctattctggggtgttggactctatctcagagctacgggtgttacaaagatgggtctgctctgtgaaccatcattgagctgtgtaatgatgatttttcacttttctgtgtgtatgttacccttcaataaaaagaagttcacttttaaaaaattttttgaaaaagcactggctcttgtcaccactctgaatttgtctgcccatcatctgaatttgggaccaccatcaccattcgtccctttctccagtgctttttaggtctgccaccttggctgccatgtcccaatgggcacttttcttctgacgacagcctggccccagtgcttcctcctccaggcagcctcccctccactgtccagtaggaaccctgctctctgtgcacagcttgtacacactcctcctttagcacctgtcttagtgtaactataaaaaaatacctgaaactgggtaatttataaacaacagaaatgtatttctcatgattctggaggctgggaagtccaagatcaaggctagcagatctggtgttcagtgagggctcattattcatagatgacaccttctatgtcctcaagtggcggaaaagacaaactcctttgggtcgcttttacaaaggcactaatcccattcatgagagctccaccctcatgtgctaatcacctcctaaaaggtcccacctcttaaaaaatagccaacttggaacttggagtcctgggtctgtgtcccaactcccctgctggccagctctgtggcattgggaaagtcctctaacctttcttaggcttagtttcttcagatgtaaaatagatacaatagaatgtggatttcacattatttgcaaatcataaggtgccacataactaaggtttcactactgaacaatgaagccctcgggcctcaattggagtttttatgacacagccaaacctcccaggaggatctggggctctttttctataaaatctatgttctctgtgggggagcctgggccagtggcataaatttgcattttggttcagtttaccacctagtaagagacattttgtttaattgagttctattttttttaatgtgccttcccagtcagcacagaaaaaaaacagaaagctagttgacatcacttggaaagccagctctcttcgcaaccgggcctttctctgagtgattgttctttttctttttcttttttttttttttttttgagatggagtcttggtctctcacccaggctggagtgcaatggcgccatctgggatcactgcaaccttcgcctcctgggttcaaccaattctgcctcagcctcccaagtagctggaactacaggcatgtgccactatgcccagctagtttttgtatttttagtagagacagggtctcaccatgttagccagactggtctcgaactcctgacctcaggtgatccacccgccttggcctcccaaagtgctgggattacaggcataagccactgcacctggctgtgattgttcttggagaaatgaactgtattccctgtttgcctctagagcaagcttggtcaacctgtggcccataggctgcatgtggcccaggatggcttttaatgcagcccaacacaaattcgtaaactttcttaaaacactgtgagatttttttttttttttttgcaattgttttttcagttcgtcagctatcattagtgtttgtgtattttgggtgtggcccaagacaattcttcttcttccagtgtggcccagggcagccaaaggattggacacctctgcgtctatagccaaaaacctggtagggaaaggggtggttagaggctcggatgccactgtacttccctcccctctggtggcaagaacttcccccaggaatggttctgaaggcagaggggcttttgcagctggaggccaggaatgttgagaaggacagaccagagccggctccactcaggctgagagaggcctgcggaagagtcaagctctgcctcccaggggcaggccgggtgacaggccacgggcctgaggagagaagcctttagcccaaggttactgaggggccacagaggccaactcatccactcgcctctattatcctactgggaaactgatgcccaaagaggtcatgatccctgtcccaggccaaccacacaggtggtaggtggcagggtccccatcctgctcccctgccctaatgaacacccagatcagataggacaaggctggagaggggctgcaggcccgtgaggggggtggtgggggaggggagtttgggatgagaaagactgtattagggtcccccagagaaacagagctgtagtagaatacatctctatctatatgtatacatacacacacacatataaatatatacatatatacatacacataaatatatacatatatatacacacacatacacacacataaatgtatacatatatacacacacatatacatatatacacacatatatacatatatacacacaaaaaatatatacacacacacatataaatatgtatgtaaatatacacacacacatataaatatgtatgtacatatacacacacacatataaatatgtatgtacatatacacacacacatacacacatacatatagagagatgcttgatgaggaactggttcacacagttacagaggctgacaggtttcacagtttgctggccggagacccaggaaagccagtcgtgtggttcctcctgagcccgaaggcctgagaaccgcaggagctgaaggtgtcgatcttagtccaagcaccggagaaggtgagatgagataccccagctcaagcagacaggtgggaggcaaaaggggtggctcgctccttcctccacctttttgttggattcaggcctctgtggaggggctgatgtctgcccacacttgggagggacagagtctcactctgtcgcacaggctggagtgcagtgccacaatctcagttcaccataacctccatctccccagttcaagcaattctccgattctcctgcctcagcctcctgagtagctgggtttacaggtgtgcatgaccacgtctagctaattttttatttttagtagaaatggggtttcaccatgtgggccaggctggtcttgaactcctgacctcaggtgatccatgaacctcaacctcccaaagtgctgggattacaggcatgagccaccacacctggcggtggcaccactttacagagtgcaaatcccatgaagaaacagcctcaaagacacacccagaggaaatgttgaatctgggcacccagtggctggttaagacaacacagagaattaaccctgctgcagatacaaaggctcccccaggggcagacgggtgggctgcctagcatcccttgtgtcattagaccgcccgttctcaaccctgatctgagggcccaggacaaagatgcccttggtctaatgagaaattagacaaataagggccatacagcgagcttgtcccgatgcctaaatcaccccattgtgtttattctgaggttatgtcttttgtatgtgctgaaagtttcctgtcaaatgaaattaaggaaaccatagatgatcgctattcatgtctttcttgatcaaataaatccagtgtctagaatgtttttgaaatgttacttgttcctgaaattccaaaatcaacttgattaagaccgggcatctgtcttccagagaagagaggactgggaagccctggaagaggtagtcccaagtccccaaactcaggatgctgcggctaaaagcagccagggtggccaaagtcagggtgggtgcagagccgggggcatcacgcttctgctgaacccaactaaagtaactcttcctctgtgcctgggtggttcaacagagctgagatctgaatggacgtctacttgaggtagcaggaagctactggcttagttctacccacagaaacagattccatcacaaacctcctgcaagggaccccccgccccagctgctgtgtgtccctgcccctgggagtgattaccccaagctctggctttctacctggggttgcatagatgaaaggaaccccctgtgagtctgtcccaaagtcctttgtggggctgtggccagaggtcttggtgccaggctagggctggaagctggcaggatgcagagggaaattcaaggctccaggcacgcacccttcatgatctgaagtggggcggcgggggatgcccaggctcaggagctggaacatcaggcccagcacacactgggaagctggatggaccatctgccaaactcagaggattttgtccttggagacagggtcttccctccatcagctgtgcttcttagaagcaaagaaaatcagcttttggtaactgaagcagaaaagtggtttatccaaggggtatttgggaaaatccttggccgagcacagtggctcatgccagtaatcccagcactttcggaggccaagacgggcagatcacctgaggtcaggagttcgaaaccagcctggccaacagggcgaaaccccgtctctactaaaaatacaaaaattagccaggtgtggtggtgcacgcctgtaatcccagctacttgggaggctgaggagggaggattgcttgaaccctggaggcggagattgcagtgaactgagatcatactactgcactccagtctgggcaacagagtaagactctgtctcaaaaaaaaaaaaaaaaaagaaagaaagaaaagaaaagaaaaagaaaaaacaaaaaaaaaaaaagaaaaaaaagcctcctctacttcaggctgtggagtggaccagaagccctggatgccatacccaaatggaacaactagaacattgcattggatcaaatacaaaaaccagtgtttaaatgcattgctgggttgacactaaaggagagagtcctagaggcaaagcacaaagtgagagtaggaagcctgggtcccctgaagggaattgttttggagaccaaaggagggtggagtggggctggctgcccagaggcccaggagctctcagcaggcaagggatctaggcgggtgcatttgcatcaggagttttaataaacagacaatacccgacctacgatggttggatttagaatttttccactttatggatgtctggggtattaaatgtattttccacttcatgatgttgacttatgttgggtttttggggacatagcctcatcgaaagagaaaaagcatctgtatgtgttggttcagcatttggtttggtttggttgtgagtgaggaaatcggaggctgttgcctccgtcagtagagatggagtagtcaaaatgtgaggcccgcgggtgaggatgaagacactcgcaaagcacaggcccatgcaacagggatttacacaccgcaaatctcaaaactgacgacgttcaggcatagcagcagccttcccttttggttagcatggttgctattcttcctagtttgctctttcgcagggacagtcaaaaacaaaaaagaagcataatcatcataataatagttattattagtaactctattgaggccatcactgtggctcacacctgtaatgccagcactttgggaggccgaggcaggcaggtcacttgaggtcagaagttcgagaccagcctggccaacatggcaaaaccccatctctactaaaaatacaaaaacaaattagccgggcatggtggcgcacacctgtaatcccagctactcaggaggctgaggcaggagaattgcttgaacctgggaggcagaggttgcagtgaactgagagcacgccattgtacaccatctcaaaaaatgaagaagaaaaaaaactattgaatagccctactgggtaccgggtacctagcacaattatatgacttaaatacattatttcttatcctcacaacaaccatctacagtagacactatcattccagttgttcacatacaggaactgaggcccagagaggttaaatatcctgtccaaggacatacacacaactctgaaattaatttatcattatatttgagacactgagaaatcaacaagcaacgcttttacagcatgtgcaaacacagtttttatgtgacctttcccaacagagcatttgataaaattcaaggaaatgatgtgaaagcagctcagggcatcaaacccttggacgtgctaaatgagcaggaccaggtttgcagccttcaggaaatctaacttgatagattgtgtctaggttggcacattgcaaagaacttgagggcagacaacctcccctcacaggggcctgaagaggcctgtctgccatagtggtggtggaggcaaatctggaaggtttttttttttaggtggagtctcgctctgtcacccaggctggagtgcagtggcatgatctcagctcactgtaacctctgcctcccaggttcaagctattctccaattctccttcctcagcctcctgagtagcggggattacagatgcacaccatcacgcctggctaatttttttatttttagtagagacaggggtttcaccgtgttggccaggctgatctcaaattcctgacctcaagtgatccgccctcctcagcctctcaaaatgctgggattacaggcatgagccactgtgcccagccaaacctggaagttttagaaatcatgaatgcaagaaatgggggccaccatctctcacgaatgttgagaagcctgacgggtgtcctcactgagcatgaaggccgcccccatcattaattcattcactcattcagcaattatgtcttaagtctttatggtttgccaagttctgtatgaggccccgcattcaaagcagtaagcaaaaccctcgagttcagtgggggagcccaacaacgcacgcatcgtttccttgccaagtatcactgctgcggtgagtgatggcaaaacagaggcaaaatgacaatgcaggtctctcacttcatggatcacatcctgggatcccaaaatcgccacattaatactgatacactgtattttatcttaaaataagccatgtccaaactgtgtacctctagctaaaataactattccaaactagtccctggtctctgttcttgctgaaagcacagctgtgtttctccaggtaggataatcgggaaagacggtacaggctgaaataaattttctcaggccaggagaaaggaggctccagggactggcattagctgagaaagaaaacagaaggggatggaggatgagaggagaaaagaaccacctgtgggagaagggatgcgtctggctccaggtgaagagatgggaattaggctgggaaactccccagctcctgtctccttccctctttcccctcgctgccatcccctccaatcccctcaccataccccatcctgtttgcattactgtctgtttccacttcaccctcgttctaaatgattttccagtcgatagaatttcactggaactcaaaactgctttgaggagacatgaaaaagaggaataagcagaagaaacaatgagaatccaagggagatcttttgggaggggttttaaacagaagggatgtgatcagagccctttctaaacatgtgcacctttgttcagtttgaatgtaaagaccatatgtctttattttatgtaattgcatatcaagatataaatgaatatgacttcagattgaaattctgaaaaatcagtattataccaacaaaagtaccataagctggttctgaaatgtcgcttgttaagccagaatcctggacgccaatggatattgtgatcgccactctggtagggctgtgggcagagtgcaggggcacaaagtggagaacctctgcccaggctgcggtgggcttcctggaaggggtgatgaccagaagctgagatgtgaaggatgggaagttagagaagaaaaggatgtgaatgtggagaagaggtgacctcgcacctttgggtgctgtgactttgatgttggtgctccagccacacaggaaatgctgcaagcagtgccagggtgctcctcaggaggcagttcaggacccacctcacttttacttttttttttcttttctttttttttttttgagatagtgtgtccggagtttgttccttccagtgggttcatggtctcactgacttcaagaataaagcagcggaccttcgaggtgagtgttatagctctcaaaggtggcacggacccaaagaatgctcagcggcaagatttattgttaacagcaaaaggacaaagtttccatagagtggaaggggacccagattgctgcggctggctggggtggccaacttttattcccttatttgtccctgcccacgtcctgctgattgattggtccattttacagagcgctgattggtcaatcttacaaacctctagctagccacagagcactaattggtgcattttacaatcctagctacagagtgctgattggtgcattttataatcctcttgtaagacagaaaagttctccaagtcctcacccaacccagaagtccagctggcttcacctctcaatagggtcttgctctgtcattcaggctggagtggagtagcccaatcttggctcactgcagcctcgacctcctgggctcaagcaatcctcccagcctcagcctccagaatagctgggactacaggcatgcaccaccatggctaattttttttttcttgtatagacaaggtctccctatgttgcctaggctggtcttgaactcagcctcaagcaatcctctatcctgtgtctctgaaagtgctgggattacaggagtgaaccccctatacccagccccacctaactctctttttttttttttttttgatacggcgtctcgctctgtcacccaggctggagtgcagtggcgaaatcttgactcactgcaagctccacctgccgggttcacgccattctcctgcctcagcctcctaagtagctgggattgcaggcacccgtaccatgcccgcctggctaattttcttgtatttttagtagagatggggtttcaccatgttggccaggctggtttcgaactcatgacctcggctgaccccccccgcctgggcctcccaaagtgctgaggttccaagtgtgagccgccgcacccagcccccacctaactcttaatggactgcaacatacactctagaagagatgtctgaacaattctaaaaacagacaatccttagtatccacttcaacccctcagaacattagcagcaccctaggcacgactgattcccagcggcagggtctctgctgagtcccctgaacctaaatgtatgaattagcacttaaggaactcaaaaatcaatgtcagagaatgcagctgccgacgttgaagtaggcagttgtttcctaactcttaaatttcactaatatattgtaacaaagatggaaacaaactgcatctttatggttatagagggttctcttcctccatcactaacatgcacttacaggcttcccagaagaaatctcctttctgggacttttaagagatagagaatacagacagaccttgcccctttgttggacagattcaaatgttttgcttgtttttgtcctttatttttttaaaaatttttggtaagaaacagggtcttactctgtcagccaggctggagggcagtggtgcaatctcggctcactgcagcctcaatctcctgggctcgagcaaatgtcccacctcagcctcctgattagctgggaccacaggcacacaccaccacccctggctaatttttttattttttgtacagacagggtttcaccatgttgcccaggctggtctcaaactcctgggttcaagtgatccgcccacctcggcctcggtttcccaaagtgccaggattacaggcatgagccactgtgcctggccttgcttttcttgtatagaaaaaaaattctacctcattgtcatttccaaacataccctcagttctgcccctggaagcaaaacaaattggtactggaaaaaatgaacaatccttctggcttcaggagccccaattatttttggagagcatttgttgcttattagagggaccttgacaacaaaagcctcacaattcattacttaacaggagaatactcatcttcctattggatttgacaagggggctataataagttcttctaaaagcaagcccagaccacttaattataaattgtaaatgaagatttttttaaaaatccttgtttcacagaacttcacacatctatgtacaaaatcaaaagactgtgagtgtctacactgatttttgttaagtgtagtgcagatttttataagggcattaatatttggttcacagagagaccaaagaaaaatttaaataattgttgcattatctctggcagatttctccataaggtgaaaggaaatatggaagtggtcagtgtttgggaatgaaatccaattgttcctcatataaaataaggtaatgagaaatccagacccaaagttctaaggagaaaacgggtacaagtttagaaggaaaaactatcggagtaaatgaatgggcatgtgggatcctgacatggggatattgggaaaacagagtagactgcattttaagcttataaagaagggcatataatacaagaagtaaagagacataaacaatttagcaagaatcagagcaaaccatttagattctattttagcaatatggaggcttcgctattctcaaaccatcccattacaaaacacctaaaaatgttggagcccatgagaatgtaagggagcacacaagaggccagtatcaaagctcaggtgtgaattccgaaagctaaattcttcaaactaccctaaggctatttgccaatcccctttagacagccctgtggagaaataaagataaggccgagacccatcaaactaaagagttggaacagagcccacccacctcccccgcacccacccactccctcaacacacaataaagccagaattcctaaaagtctattcttaaggtgtaagactgaactaggaaaaaaaaaaaaaaaaaaagaaacaaatttttttctctttggctttgtgtggagaaggataacagtctctactgaaaattcatgatcacatcccagcccatgatctgcgtgatgttgaaagactcaagccaaggcttccatttaaagtggatctagtttgctacttccctaggcacctggaaaaaaataaatgcaaattgtccttggaaaaatggaccttagtcttcagtaattttccgtgattaaatttgcatggaaaatgagctcttgggagagagagagagagagagagtgaaagagagagagagaaagaaaacattctactaggaataagaatcagtacaagtaatgaacagcggaattagactcctaaatactacaaatatgagaactacaaatatcaaaatgtattaaaattatgtttaatatgctgtacatttttaatatgtattttcatattctgaaattctactggttatgaagtggctacgctgtccggagtatataccctgcggttcgttgtcgtactccgagaaagaattcaggacacagacacacgtgggtgagttaaggagtggaaaatttaacagaagaaaggagagaggagagcagctccttgcgaaagagagagatgtccgaaaaggcgggaggtggtggactgtatcagattttataggcagtctggagaaggtggcatctgatttacacagggctcacagattggtttgatcaagtatgatgtctacatagtgtatggggaaggctggtcgccccaccctaatcttcttatgcaaatgggctttctagttgatcagtgccatcttgtctgctcctttacagtacaggtggctggcagagaagagaagatggagctgccatcttgaacatgtctaatccttagttcccattgacattcacccacacaagctcctagctcgcaggctgttcttagttagaaaatgatttggggctgctttttattaaaaaaaaataaaataaaagccttacagaggactctcatacccttggtatctgctaagttattctttcttaacttctatatcagttatttttaaggaaaggaaaacaagaaaagagaattaatataaaagtaaatttaaaatgaatataaaagaatgaatttaaaacaaatataaaagaatgcatataaaattaatataaaagagtaaatattagaaaaaagaagaatacaccatctcaaaagaccaggctgatttcaaaactaaccaaagcaaacttcagaaaataaaatatgcaatttctcccctgggctgatagcaagaatggcattagattttgtttttactttactcattttaaaaaagtaaaagaaaggctctaaagagttcaaatacaaaatatcttttcttgggactttgttcattttaaggtggttgatccaatgaggaaaagggctcaggtctgtgatgttaatattgtgtcaacttgactgtactgaaggatgcaaagtattgttcctgggtgtgtctgtgagggtgttgccaaaggagattaacatttgagtcagtggagtgggagaggcagacccaacctcaatctgtgtgggcaccatctaatcagctgccagcgtggctaggataaagcaggcacaagaagatgaaagagcagacttgctgagtcttccagcctccatctttctcccgtgctggatgctaggaagccctcaaacatcagactccaagtgcttcagcttttggactcttgtatttataacagtgatttaccaggggctcctggggcctttggccacagattgaaggcttccctacttctgaggttttgggactcggactgatccaccactggcttccttgctcctcagcttgctaacggcctactgtgggactttaccttgtgatcgtgtgagtcagttctccttaagaagctccctttcatgtatacgtctatcctcggctgagtgcagtggctcaagcctgtaatcccagcactttaggtcaggatatcgaggccagcctagccaacatggtgaaaccctgtctttaccaaaaatacaaaaattacctgggcgtggtggcatgtgcctgtaatccccactagtcaggaggctgaggcaggagaatcgcttgaacccaggaggaagaggttgcagtaagccgagatggcgccactgcactccagcctgggtgacagagtgagactctgtctcaaaaaaaaaaaaaaaacaaaaagaacatatatatatctcctgttagttctgtccctctagagaaccctgactactacaagtctcaggctgcgcagttgtcctgggatcaatgagacttcagattgtcaatgaggaatctacttccacaatatccattcccaaaaccataccaccatcccctagatccccaattacacattgtttattagtaaaagaaggaatagtttcaggatttatttatttatttatttatttatttatttttctttttctttctttcgacagggtctcactctgtcactcaggctggagtgcagtagcacaagcatagctcactacagcctcgaaatcttgggctcaagtgatcctcttgcctcagcctccagagcagttgggatgacaggcacacaccaccacacccagctaatatattttttctttttttgtagagatggggtctcactatgtggcacaggcgggtctccaactcctggcctcaagcgatcctcctacctcggctcccaaagtgttgggattacaggcatgagccactgtgcctggccacttttgccatttattatacataagttttgcttaggcaaaaaaaaaaaaaaaaaaaaaaaaaaaaaatgtatagtagtaaactcatgaaaagcttcttccatgttgtacctgaggtgttacctcctaacctgcttaggcttgtttttgtttctggttgttactaaaccaagaactagaggacagaggcccctgtgtaccaaaggaagtccttggaggaagggggaaagcactcgatgagtaagtgttggcagagccggcttacattttctgcagctgtttggaatgcagtcaggactaataatgaacagctatctttctgaacttcattacggggtagcccatataagaacaggcacaaaatggtttttgttttgttttttaaataacacccctggatgcccgcagctggagggatgtgaaataatatcacacagggaggactctggctcaaacaggggattcgtttccctgtggattccattagcaatcgctcttctgctgaagagctggggaggtgaagcagagaaccaactgggatgatggaagaactgtccagccgatggagaaggagatcatcaacaacaaacctcaaatgttcatgagaaaatttagcaaggacgaagtctctttagaaacactgataacaggatgtcctgaaaatgaatcccaacaattgcacatctacagactaatttcttttttaaaaattcagatatacaaaattctgttgcaatatgaaaaataggacagggccaagggggttggggggcagccttataagaggctgaggttgggcagaacttaggtttcatcagagtaacaccctaagtcatacctctttgaaggttttcactagttttttaatcaagtagaaaatagaagttaattttataatttccctgtgtttcacagtagtgtttttggtttttttttcaggccattatggttttcatttccaatatgggtccagtcatctaacgtttcacttcttccataaagtcccaagttcaagaacttctccaggttttgtcataaaggctcctgcacagagtaaaacataggatgctattaagggcaaaagtctcgttctttcaaggggatataaaactaggaaagcagccctcagccaagatcccccagcacaattgtattagtctgcttggctgccataacaaaatatcacagatgggtggcttaaacaacagaatttatttctcacagttctagagactggaagtccaaggtcaaggtgctgtcagggttggtttctagtgaggactctctccttgggtggcagaaggcaccttcttttatattttcttttttttttctttgtcattttattttatttattttcttgagacgaagtctctctctgttgcccagactggagtgcagtggtatgatcttggctcactgcaacctccacctcccgggttcaagtgattctcctgcctcagcctcccaagtagctgggactacaggcatgcgtcaccacgctcggctaatttttgtatttttagtagcgatgaggttttatcacattgcccaggctggtgtcgaactcctgacctcaagtgagccacccaccttggcctcccaaaattccgggatcacaggtgggagccaccgcgcctggccaaggcaccttctcattgtgttctcaagtggcctcttcctgtgtgagaggggaggagaagggagaggaagggagtaaggagggaggtccctggtctctcttcctctgcttataaggccacagtcctatcttattagggctccactcttttgacctcatttaatcttgattatctctctaaaggccctccctccaaatacagctgcaatgccagggggtagggcttcaaagtataaattccagggacacgcgattcagttcataagaaaagtattgctttatggaggttcatttgtgacatctgaaaatgtgacaagacctcagacttgttcgaacctcccagttgagaggaagagcactgcctttgtcttcacaagatgtggttttgaatcttctaccccttacctgctaaggtgatgttgggcagtttcctgaacaagcattttgggagggtcatatatgatacatgaaaatgtgtagtcctgggccctatgaatagcaagaaattaatacctgatagttcaatgactcttctggatgattctgtgtgtgccagaaatgtgaagtcaaaatgctgtgactgagttgggtcaaatatatacggctatagtattggttattgtaggataaaataaagcaagttgaatttatttccagggcttttcaggttagctaatgttctcatatttgttcctttgtaccaaaatatgaacagctgggctgccagaaatatgttcttcaccctattttctgaagctagctgcattccttttcctttctaaagtgaaagaggattaggatcaacagttagacaaactagtgtatgtgtgtctttcttggagaaaagcagaactcactcagttagccatttttctaataaccaaacactctgtcctaaagccctttaaactgatactgtgttgaatgatgtcactaatgttaattgacagtttgctggaaaccatctcttcaaaattctccttttccgttcaagtcctgtttattttgtcacagaattagaaatcaagaaacttccagaaagaaaatgtgtgtgtgcatatgtgtgtacgcacatatgttctggcttttaaactaggaaggtcatttgcaagagagagagaaaaaaaatgcaacaagtagaaatgaaattagacctgtgtttatacagttctcctcattggcccaggacttatttttgaaagtttgtaaactggccttccagtttaaattgaataagtaggtgcagctgagtaaatggagagacctgggtttgcagccatgtgttttcactttaaaattacatcgaagaggaacacgggggttagaaacaaaaataagaaagggggagagaagacagtctacatttaaagggaaaacgtgagaaaacgaatagtcaaaacagaagtccaatctgcttggccccaaaggggtcggcagccactccaccatgacaggggagacagaacagcctgcccagagctatccccacagacctggggacgaggggagagcctgcaggcaaggaacactgaggtgctgcgcagggcctgtaaaggcctggagacttccaggctggcatggatttaagacaccttcatctggaagtctccccacagcctcctgggggaaatccactcttctgctcaacttaaagaccaacttagctgatcctcaataagtaagaacactgactttctctgtagctacttggtattggctgaattgcatcccccttcccaaaattaatattttgaagtcccaagctccagtatctcagaatgtaactgtttggaaataagggctttaaggaagaaattgagttaaatgaggtcattagggtaagaccttattccagtatgaccgatggccgatgtccttgtaagaagaggaagagatatcaggggcccgtaaacgatgaaaggccacgtgaggacccagtgggaaggcaggtgtctgcgagccaaggagaggcgcctcatgaaacactgaccctgcagacaccttcaccttggacttctggcctccagaactgtgaggagatatgtttctgtcacgcctgccaccgagtttgtggtatttggcttgtgggttatggcagcctgagccacctgatacactactgaagacaaccctacctatggctccagggaaagatgggccacgtttttgctgtcactgacactgggagaatagggtggcttcttcctctgacaccagcggaatcgcttcatttctgcctccttaacggcccgggacacgttgtaaaagccatctggagactgtagtaattcatgaacttctgggtgatcgtaaaagacttccctcagcttacccctgccacgtccctgctacgggtagaactgtgtccccagcccctcccactccaaaagctatgctagagtcctaacccccaggacctgagaataggaccttatttgcagataaggtctttagagaggtgatcgagtttaggtgaagtcatcagaatgggcctagtccactgtgaccggtgtgcttataaaggggaaatgtggacacagagacaggtgcagatgaaggccatatgcagatgaaggcagagagtgggtgatgcagaggcagagggacgcaaagctcgtggggaaacccccagaggctgggagaaggcctggaagaaaccaaccctgaccccacgttgaccttgaactttcagcctccagaatcatgagacaatacatttctgtagttctgccgccccccccccccccccccccgcagtctgtggtacgttcttatggcagttccaggaaacgaacggtccctcttcccagggtccatctcctggcaacctgatgagaatcagctccggggcgtccagtccataggtgctcagagaagctgtggggcccgatggctgcacacagttggtgagagctgagagctgcagcagccctttgtctgctcacactcagcccaccagtcccccacccacccctcctaatggctctgaatctcccccatgcctctccgcttcttctctctccacgccctatgtacccacgcccttctccactcctgttttaggctttagttccccgaagtcttctggttccctctctggcccctcccgggctggcgcctgcaaacccaccccatcccccattcccaacgcccccacccctcccactcctgggcccctgccttctgcggatccctgaactcgaggcctggcgcggattgcagatactcagtaaatattcgctgaaagagcaaataaaatgaaaaatcgtgttgaagggtgtgatgtaaagacagacgtatttgtctgtgactatgtaaccaatttccccaaacctcgcagtttattctcacggtttctgtgggatgggaaccggaggctcagctgggttccaggcgggctgttggctgagcctggctgccacaccagggctctgcttccagctcgctcacagctgctgcctggcctcggttcctcgctggcaatgcggagaccttggctcctcaccacctgggcctccccgtgggtggcctgcctgtcctcgggcatggtggccggctccccggccgagggttgtatgaccaagctggagagccggagatgaaagccacaggctcttgccacctagttgtggacaggacgtatggtcacttctgctggatctatggatacaatatgggggagggatttttccagggtgtgaattccaggaggccgggatgatcagagccatcctgaaagctgcctacccagagagacaagggttcaaatcccagactttccatcaactggctcagggcaacactggcccctctacagatctccttggctgatttttagctgaatcgtgacggctaataattggaaggcgatggactgttcaagtggttgcatatgttgcctcactgaatcctcgcatcagcctccagagccagctagtactactggagtctacttcaaaggagaaccactgcaggtcacttgcatggtaagggacggggcctgcaaccttgaacctgggtctgcctctcactccctcccatggttttggtttttgtttttgagatggagtcttgctctgtcgcccaggccgccacgcagtggcacgatctcagcttactgcaacctccgcttcctaggttcaagtgattcttgtgcctcagcctcccgagtagctgggattacaggcgcccaccatcatacctggctaatttttgtatttagtagagacggggtttcatcatgttggccaggaactcctgacctcaagtgatcctcccacctcagcctcccaaagtgctgggattacaggcgtgagccaccacacctggcccactcccatgtttttaatgtgggaaactgagactgctggactgctgagccttctgctgaagcctggggctgaggaaagggcttccaccttgctgcgggctctcaccccgcacacattctgtctgcttttcctgtgctaggagcagtgccacggggctcatggattctcaggcaacacaaacgctcaccctgtggggagagcctgtctcctctgaacagaggtgggcggtttgggctgcttctcagagtcacagtctgcaggaaatcaactctggcctgatggcacagtgtccggtggccgcttggacactggctcaacatgcaccagagccaggtcacgagctgtcactctcaattcacctttgtttccaaacatttgtttctgccactttaaggggagggaagggttttagcccaaacaaactcatggtttggagtcactcactggaggcggaggacacctcctgggggcagtgaataggcaatgagagggactggaaggtcacatttgcagccagagcccaggctgccctggcatgtccggcaggaccatggcccgtcctcctattggacggctgcgtatcccctttccctcggtgaccacatttcaggacccttgatttctttgcaaatcccaccctgcctggccagtcccctcactctcatgccgaccgcagaaccaaggctgcgccccttcaaaggcagagttggggtaattttacttgacaagactgctgcctgccctcctcctctttcctcatctgccttcctctctcctgaccctgtttattattatcaggaaaaaacaataggtccacatttaaacttcaaagaaaagcacgggctcaggtttcaaacaactgcagaggcctgggcttgggacagctccatcccgctctctcacctgaactacggggaacctggggatggatttcaactctctgcagcccagcactcagggtcaaggtgaggcccagtctgtgaccacggaggaattctggaatgtggtgatgaccaacaggaattttatgagtgtccctctgtggaggagcctgagagaaaggctcatggagggcagagggtggagggcgtgggaccaagttccttagataaggctgtggccccatggtaagggtctggacggggaaggtcagtgttaaccctttgaagggcccccggggagtggatcaggttcagagcccaaggctttcacacataggtgtgttctaaagctggtaaagcctcggatcatcagccagtgtcaggtgtcacagcatagccaagcgaccagacgagcagatgagaccttgttaatctccagtggtgatgagtaaccgttctctctatcacatatcacatactgggtgcgttagggggcccttaggactcgctccattctgccttaccccacagtgacttgaaggcacagctcctgttccccaaatgagtctcagtgtgttgttctcattcctgccctttgagtacatctacccaacctactgatttcccttgtttaatagcatttaaagctgggtgcggtggctcacacctataatctcagcactttgggattttgagatgggaggattgcttgagaccaggaattcaagaccagcctgggaaacatagcaagactcccatctctacaaaaaaaaaataaaataaaatattacctgggcacggtggtacatgcctgcactcccagctactcaggaggctgaggctagaggatggctttagtccaggagattgaggctgctcacttgctatgatcacgccactatactccagcctgggtgacagagtgaggcactgtctcaacaataaataaatacataaaaatagcatttaagcgatggagggagggagatcctttaggccttaacctgtgttgctaaacggaccttcagaactccacctaacatgtcagggacatcttgggaaggcagagtggaataattaaacaagacttggtgctgatggcagacaggccccactccaattcacctccactgctagctcactccatctcacctccactgctagctcactccatctcacctccactgccagctgggcctctttgaacagggcgcataagataattgaaactttcagcttatctctagaatggggaaaatcatacctattttgcagactttattcagagagaaagaaatgcatataatatgcctagcatggaaattaatgtccaatgtaatagttttctttttccactttcccctggaagtgattcatccaggtggcgctaggagggatcttcgccgcagagggcattcgagagatgacaactctagacatccatgcaacttctgttcttgtgctcctgctgttttcaaattccacagtcacagactgcaccctggaaaactcaggacaccctagagtgaactgctctgaagaacaaagttgctacttgcttgctacctctggttgctacccctggttgtgtttggttgccacataatgaaatgattttccttccctcttttatttcctttctttcttttttttctgctacaaatggaaaaatagtttgatcaccttgaatcttttcacccttggtattctcccccttcacacccgagcaccgccccttgataaatgagaacacgtgtactgaaatcgcagacttcaccctccagactcatcgtcctcatgctctcaggggggacatgtttcctttcaaacctccagaataaattcatcacagcaggaagaagattgtttttcttaaaaaaaatcaaatcctgtatcacaattatttcatttcagagggaaaatgctccccttccatctgaaactttcttctctccagctctgcagtctttgaccgtggcgatccggcaccctcggcccggctgcttttgcaaagtccacactgattcattatttcagagagccaaagggtgacacatgcatattttgaatattaccctgtatgtagatctgcctctggcttgacttaggggcttctaactgcctgatgtattggcactcgcatgctttcaatggtgtttgcatttaaaaaatcatcttcaattctttcatttggagggtgaactttctgaaaaggatgctgggaaccatgttatttcagtgttatttctctactataccagcccctttgcaagcaaacccctttttccttaatgacaacacacagtgacaaatgcccagtgctgtaaacgtgaagctccttggtttgactgagacggtctgtagctgacatcgagaagcaggacatcttcctgaaccaaaacacctactcaagaactcctataaacttccttacgctttgttttaaggaaaaccgcctgacaagaagcatacttgctcctcgctgccaggcatctttctgtttatgtagcctttgtttacatgtatcccctgttaataacaatcaatatttaacagatgcactcaggcatcttggaaactaattttctttcaaacgcaagcactttctgggaaggaataaagggagaggagagtagggttggcagccctccatcgcgtgaccatttattgtcatggaatgtagcagaagacggctcctgctatttccttttgatttcagtgtgtaaatctgctctcacctaaagcttgaccgcgtgacagtgcagacacacattaaactgattatttctgtctgagctgtgtgtagaatgtgcactctaaattgcacataaaaatgttctccaaaatagtaccacctgcctgcacgaggatcattttctttcacaaaggcagactcaaatgtgtttctgtgattctgcagcctctgggctgatgagggttgtcgccctttctgtgtcgggtgcaagccgggctggactggggttgctgctcttcttagccccctgccttccactccagagggagatgaggactccggcggcctcactgtggtgtctttagttcttgcttagaagagggtctcagattcccagggagcagcttctcctgatcaaaaggagagagaacagaggaaggcagggtgggtgggcagaaggggctggagtggagcgagtggagaaaaaagaggcagaagaacataaaagtatagcacaaaccattgcagcccagggaagagcacctagagaagaggggagagaaacgaacctagtaaggaagactgagaaaggaggataaaagtaaacactgggagagtggcttcattttttacaaggcaggatgaaaactaaccccagaaaaggcaagatcaaattattatgatttctccagactagcccatgtttctccaaacaaatgccgtgcccttgccaagaaaaagaagagaaagatgttcagaaggagaaagagaggtgttttgtccgtacaggggcaagctatgggatgtcattctcaacatagcgcttccctgactcactaactcacacaaggaccagagtaaaggaagtcatctcatcccaactttgagggctgggcttgcaaatgcttctaattttctaatatttggggttatgtgcaggaattttcttggtcatgttatgctctggatacatagctttgcggatctaagcacggaagatagaggctgccccttcagttatagttgaaaaattgaggaccacaacttttctgtcatgtctttattagctcggagggctgaggctgctctgctctctcacagactttgggacttttggttttggcccctaaaagtctggggcccttcatcctcacccacagactgtgctttttgcttctattttccattttagccaagcttctaagaagtaatctatatccatctgggctcagtggatcatgcctgtaatccctgtcctttgcgaggccaaggcaggagcatctccttaggccaggagttcaagaccagcctggacatcatagggagatccccatctctacaaaaaaaaatacaacaaaaaggctgggcacggttgctcatgcctgtaatcccagcactttgggaagctgaggcgggcagatcacctgacatcaggagtttgagaccagcctggcggacatgataaaactctgtctctactaaaaaatgcaaaaattagctggtgtggtggttcctgcctgtactcccagctactcgggaggctgaggcaggagaatcccttgaacccgggaggcagagtttgcagtgagccaagactgcaccactgcactccagcctggatgaaagaatgagactctgtctcaaaaaacaaaacaaaaacaaaaacaacaaaaaataatattctatatccctatttctgcatctgcagctcacgttcccatatcagacatctgtacgtcagcttccctctcccacaccctggcaaagtctaagccccatgcccaaggcagagggagcttttcagtccatttcttgtcttcgtggtgacacctaatgatgctgaactgtcccttgttgaatctgcccctctgttgagctacctgacaccatcctctcctgttcccctctgccttttctgactcgccattcttcctcttcctgtcagatacctgttttgtttggcttggtttggttttagctctgtggtggttaattttatgtcaacttgccctgatatctggtcagacaccattctgagtgtatttgtgggagtgtttctggatgggatgaacattgaattggtggaatgactaaagcagatgctctccccaatgtgggtgggcctcatccagtctgttgaaggcctgaatagaaccaagtcctaaggaaggagatgttcctctctctgcctggtggtcttcaggctgggacattggtctgcttatgccttcagatttggactgaggtttacaccattggctctcctgcttctttggcccttgaactatatagatcttgagatttttcggtacccctgagagggagggggagggagagagagaggggaacctaatggttctgtttctctggagaaccctgactaatacaagcccattcttgagtgttggtgtttccctcccctacatctccctcatagccaagactcaaatgagtcacccaacccaggtcccaggcacatctcagccctctgagttctgctgctgcaccctagccgcaggtaaactattttcaccaaggtcattgccattggctgaatagtggcctcacaatatatccatgccccaatccccagagcctgggaatgtcatcttatagggcaaaagggactttacagatgtgattacattaaggatattgggatggggagattatcctggattgtctgggtggatcctacatgttatcataagtgtctataagagacagaaaaggggattcaaattcaaaattagcccccgattggatcacagacctaaatgtaagagctaaaactataaactacttgaaaaaaaacataggcgtaaatcttcgtgaccttgaattaggcaatggttctttatatctggcaccaaatgtgtaagtcacaatagaaaacagataaactagaccacatcaaaattaaaagtttttatgctacaaatgatagtatcaagaaaataaaaaggcaatctacagagtggaagaacatatttgcatatcatagatatgataagaaacttgcatttggaatatgtaaataactcttacgactcaaaaataaaaagacaagtaacccaatttaaaaatgaacaaagaatctgaatagacctttctccaaagaaaatatacaaatggccaatacgattatgaaagaatttgcaacatcattagtcattagggaaatgcaaatcaaaaccacaatatcacttcacacccaccagaaatggcttaaataaaaaagacagagagtagcaagtgttgtcaaggatgtagagaaattgcaacccttattcattgctggtgggaatgtaaaataacatagttactctggaaaacgttaaactcagaattattatgtgactcagcactcccactcctagaggtgtgtgtgtgtgtgcgtgtgtgtgtgtgtgtatgtgtggtttatatatacatacgtatgcatgtatatagaaagatggataaaagatacatatgtgtatatatatccaagataaataaaaatgtacatgtacatgaaactggtatgtgaatgtccatagcagcattattcataatagacaaaaagtgaaaacaaaggcctatcaactgataaatggataagcaaaatgtgatctattcatatgatggaatattacagagcaatgaaaagaaataaaatccagatacaatgctatgccatgaataaaccttgaaatattatgctaagtgaaaatagctagccacaaaagactacgtattgtatgattccctgaatatgaaatatccagaattggcaaatttagagagacagaaaatagattacaggttgcctagcactgaggtgagggtgggaagtgaggagggcacagagggcacagagcttctttttcagataatgaaaatattctaaaattagattctagtgatacataaatttgtaaatttacaaaaatcattgaatcgtatcttcaagttctggaattatatgataggtgaattatacctcaatagaggtgttaaaaattaaaaaataaaaaagaatgccacagaagtgatgtgtcctttgaaggtatcatatcctctgggggtcaccatgtccctttatttgctgactttgatcatttggataaagggtcatctgccaggtttcttcactgtcacgttactatttcttcctttgtaattaataagtgctttgtagggaagtccactgaaaatacataaatattgtctctcatcacattgcatgcattaatcttagcatccattgctgattcctgcctgaaacaatgattactgttgggtttgctgaatggtaatttcctgtttccatcattccttccacatttagtagctggaattctactggaaggaagacctgtccttcccctgcccccatttatttatttatccaattgtttatttatattaccatggacccatgggttcttattttattctatggtttataacaaacacacacacatttactcactgattcatcaaatatttacagcactcctagcacatgtcaaacactcttctggacttttggatttcgctgttgagcatgatgtcttggccaagacagcttttactctccttggagaaatgtcccctcctccctgagctggcacaggcatctcccttgtctgtgtcctgtgcaagtgcttgcatgggtccatgcactcagtcatctccctgtttctgaatctctctggctggcccggaggaccctgagggcaggggcccacactgtggatctcgaagacacagcactgatcttcgaagacactcagctcttgcttgggcctgggtgagctagtgagggaaggggtaaaggaatgaacaaacattgctagtgctcagatgcaaatcataatattagaacattgtctaagaagttcaaagtttaacctttgtttgtccttgagaggctgccagctgtctgttatattggttttctatccagactggatatagaagaaaaaggaaagaattcaatatgcctccaagatttctggctatgagccattggtagaaggaggtgcacacacttgggctggggatccgtgtagagaagatctgtgggtttggcagtgctgagctgaagaggagcccccagggcactcaggtgggaggtctaagaggcagctgcagacctgggcttgagatccccagagaggatagggtggggttggggagatggtgacactttgggagtcatgggcctctgtggggaggagtaagccatggggagcatgggcatgagtagagggaggaaggaagagtgcagggagcgaaagaacctatggcaacaccagtggtgacaccttgaagcctgaggaagaggctgagaagacttttaaggagagaatggtcaacagagccaagaagagcggcaagagtccccaagatagaggctgacatgggccaggacctaggtggggcggggaagttagggggcgggaggcctatttcagagactgaaatgggatgatggagaggtggagtaggtggaagggaaacttattccctgaggtaacttgaatgccgacaggacagagacctggggataccttggtggaagcagaggatcaactgattaattctttaaagggcatggagggtctcgagtatgttcacacaacagaaaagactgggccaggccgggcatggtggctcaagcctgtaatcccagcattttgggaggccgaggcaggcagatcacctgaggtcaggagttcaagaccagcctggccaacgtggcaaaaccccgtctctactaaaaatataaaaattagccgggtgtggtggtgtgtgcctgtaatcccagccacttgggaggctgaggcaggagaatcacttaaactcaggaagcgtggaggttgcagtgaggcaagatcatgccattgctctccggcctgggcgacaagagcaagactctgtctcaaaaaaaaaaaaataaaataaaataaaagaaaaaagacaagacaagactgtgccagtagaaaagaagtgtcctggtaatggatggaatcatgatcagcaggaggctaaagacacaggaggagaaagggttcagggcctggatggcagggacattggacagggagggacccaccttcctgtgaaactcgaggggaagggcagggtgagctaggtgcagaaggggttgaagggggaggggcaggggcgggaagccagggccacctcctttgaagtcctccatgtttccatgtgaggaggaggggaagtcacctgcagggagcgggagtggcaggccacagccttggatcccttcattgctgaatggcttccagagacatcaccgatgcctgaccccacagctcccagcaggctgcaggagagagaagaggggtgggtggggtgggaggaagagctagagggaaggaagttcgagtaagagagcagctgaagggctgacttgtggtctagggagggacccgggaagcaaacccaggggagccagggagggagctggaataacggggctctggccagcaagtgggaggatggagcgggttggggggaaggtgtaggaggagcagcgggtgatgacaagatctgggtgtggctgtgggtgtgagtggctgggtttgccagagcctgcgggggtttaggaagtgaagggggcattccaggacacccgatgggggggcccacattcgaggcctcagctaaggccagccaaaacagtgtccagtgtgtccaaagacagatagtgcccccaccctggggcatgggagcaaaggaagaggacgggagagtgatgcgtgggaaggggtgggcccacagaggaagggaggagaaagagaggaagggccaggggacaggcacaaggggtggggacggacctatgttgcctcagtggggaccctgcttcagagaggcaacactgctgcctggcctgcggtgtcttggagcctcgcctcccaaatgtgaactctgcaggcacctcttctaaaggcaaaggattctctgggagtcccagtttttttgtttgtttgttttgttttgttttgtttttgagacggagtctcactcgctcacccaggcagaagtgcagtggtgccatcttggcttactgcaatctctgcctcccaggttcaagcaattctcctgtctcagcctcccaagtagctaggactacaggcacccaccaccacgcctggccaatttttgtgtttttagtaaagatggggtttcaccatgttggccaggctggtctcaaacttctgacctcaggtgatctgtccccttacagcctcccaaagtgctggaattataggtctcaggtgagccaccgcttctggtccccagtgttaaaggggaaaagggttaaattcagtacaagcgcttcaggcccttcaactcctatgaaacctactcactggtgtccaacttttatacccagcaagaggctgataatggaattttgctgaaacaaaatcattgttttcatcacggctatcatccagtttactggagtccagtttctttttactttggcctcttgccctttgtccttatgacaattcagattctcctgccactggattctgtctgatatgctttgaaacctttgatcatgtgggatgtgtcagtggcacctggtttctacctggcggggtatagcttgtgtgttctggaggtgctggtgactggcagctcttagtggaacttctcacttctggattcaccctccctgaagagcaccaccttgcccaaggtcacacccccttccagggtccacccacccccagtgatggtcggtgtcgagtattgatatgatttggctgtgtccctacccacatctcatcttgaactgtaattcccataatccccaagtgtcatgggagggacccacggggaggtcattgaatcatgggggcggttaccccatgctgctgttcttgtgattgtgagtgagttctcacgaggtctgatggttttataaggggctcttgcccaccttttgctcagcacttctccttgctgctgccatgtgaagaaaggcatgtttgcttccccttccaccatgattttaagtttcctgaggtctccccaaccatgctgaactgtgagtcaattaaacctctttcctttataaattacccagcctcaggtatgtctttttttagtagcgtaagaatggactaatacaggtataaagccccaaccacctccctcaatgtgagatgactctgaagggttgccccagctcaggagcccctgcgtggggttggctgaggcctttgttgcaacttcgtcacagttcaacttctctctgcttggttcagctgccttccctccccgacaggtgttgacccttagagcattccccagtaaacttcctgtatgcaagctgcatcttggagtctgattctttctacagttcttagacttagtgcataaaaatgcaaggtgcccagttaaatttgaatttcagataaacaatgaataactttgtggtatgagtatgctccaaatactacacaagacagtatactaaaaattatgtcctgtttttgggaaatttaaatttaactgggcatctcacattttatctggcaaccctacttcttagggagcccaagctgggtcatgaaatgatccttcatggccctcatagtctgtggaagaggagccctgtggtttctatggcagtgaaagagcacaaaggttatcagaggcacgagcaccagggacacttcaagatcaatggaacatcccatctggagaatgggttgaggaccagtattactgatggggctgaattattctcagtggtggaggtgaaactgaagagctctccaaggagaaagctcccacactgcccatgtgaaggcaaccacctctggtgaggctgccaggagagcagagcatgagcaccgaggggccaaatcatggccccaccatgacagtcatgagggtagactgcctgcttcctgcccaggagttggggagcccactcttactgaagaggggactcaaagccaaatcgcacccactcctttgctcaaagcagttatagcccttttcagtggtaaggactgagctttcagtgctgaaataaatctgttttagtaaccaagaatgatgaataattatacagtcaagtcaaaatggtgtgatgaagggaccttagttggcctttagtaagaaaaatgtttcaacatggcattataaagggacggttattggaaggaataaaaccactttatgcttatgtccaatgagttatgctctcaataaataagttactattgttattatcatgtcaaagggcttttaggcctgagaaactaagttttctaatatcctaagcaaatatgcctgctagtaacgcttaccagagataaaggagaaaagatcataacttggaaaagacctcggtccttactccttggccaggccaccccctcttcctgccctctcagcctgttcccactgcactagcactgggagtcggggaggggagtggcttttggaccaaaaatgtactcaggtcttcctaaagagcttgcctcaccctgttacttcttcaaattcttctcacccacagccagctctgcaagccactgccagcgtggctctcttggggacattggtgacctggttggttcatgccctttgtactggttcgactcttccttgaccacttggcagtgcctgaagcagctgcctgcccacttcttctgaagctcctcctgcctctcccaatacccactttctctgttgattatctacctcctctttccaccttgggtaaggtacttattccccagaatgccattctcagtttcctttcattatttgtgtttttctgtgtgatactttatttttaatacactttttgcatatcagctttatttcaatgtaacttacctaccataaaattcatttttttaaagtgtttgattcagcagcttttaataaagtcacacagctgtgcaactactgtggctgtgggtgtgagtgactgggtttgctggagccagggtgggtgcaggaagtgaagggggcatcccaggtcacctgagggggcagccccgcctccatgaccttggctgagatcggccaaaatagtgtgcagtgtatgtgaagacagattctgccctcagccctcaggtggcatcatagcgcttgtgtgcaagtaacacttactttacttaacaatggtcccagagctcaagaatactgtgcctaatttataaattcaactttatcgtaaatatgtatgtataggaaaaaaacatagtaatacaggattaggtactatccatggttccaggcttcactgggtgtcttgaaatgtatcccctctggataaaaggggactactatatgttttacttctcttttgaggttttttttttttttttttttttttgagacagggtcttgctctgtcatccagtctggagtgcagtggtgcaatctcagctcactgcaacctccacctcccagattcaatcgactctcctgccacagcctcctgagtaggtgggaccacaggtgcgccctaccatgcccagctaatttttgtatgtttagtagagacagggtttcaccatgttacccaagctggtctcaaactcctgccctcaaatgatctgtctgccttggcctcccagagtgctgggattacaggcctgagcccctatacccagcctgttttgaattttgaatctgtgggtggtgatgagctagctgaaattcaagagttccagtctaatgagagaagagaacagatgcgtaggacaactagcagactctactaccatagtaattcaaaggcaaaactctgtctcttgctgtaccagtcagggtccagtcaggcaaacagaatcagtaggacacatactctcaaacccacgcatccctaggaattgatcgtgaggaactgtctggctaagaacatcagaaatctttagggcaggcttcaagaaggcaagatcagaagcaggcagggctccacagacacaagcagaagctcatgtctggagaaggctgaagctgcctttaaaggctttgcaagttatgcccatccagggtagtgtccataacttaacaccagctgatcaggggcttcaagcacacctgtgaagttccttcacagcagcatctgtatgagtgtttgagtaaccaggaagaagggtgtgtgtactacacggggctactgcttcttttccgtcctcacagtctcctaaaagtatgtcttttatggcccaccctgtctgaaaacatacaggagagggaattctaagaaatgcagttcagtacagtagtgtgtcacaaagccatcacacctgtggtcccaaatcgagaagtcccataaaagtccctagttggcccaactcaagtcatatgaccagcccaagttcaaccaccgttgccaggggaaggggtagaaaaattgggctgaatcatgtgaccgtcttgtgactagaagggggaggataccatgatgagtggtcccatagcagcacctgattgggatggggaaggaggagaaccccaaaagaattggggatactgaaaacctaacacaacctatatcatcatcttggatgccccataggactgagcaccatgcttagggcttagaaggccttcagaaagcacagctggcaactgaggtaagaactcaagtaagacctatggattatattagctcgaccatttgtccactcactgacattggctggacccggccaagaccccaagagaagagcagtcctggaggttcccactgacactttagttcctgcacatcaggaatggcttctcagcagccagtaccttttccaatgttcagaaacagttgttacttgccaagacacgttacatatctccaccacagactgctgctcgttcacactcagtttcctctggaaatctctggcaaacaccatctggctgcagcgggggactgagccctggtcttttgttgctccacggcctcctactcaggggatttcacccctcctcatggcccccaaggagaaggccctccaggtctgtgggccccatttcgcaaaggtggccagtgtgtgccccgagttccagtggcatcatccccttggtgaatctgggtcggggaaatggtgcttaactgttaacccatcaaggtttcatgatccttttcatctgtgcagttccagcagggagaggagctgtcactgtgtattagcctggtctcatcctccacgatgttgtcaactccctggcaggagaagcgatgttgcatcctgcctgtacgtttcctccatgcctaggacggtagtttgattttaaagggcgccaggtaaatgtttgctgatgaatattaaacgaaggaggagatgattttccagccatcatgggaggaggtcaggaggggctggactccacttcccttcaatcagagtcaataactgacctaaagttctagcctgcaatgcgcggtactcatgcaaggtgggttggtggtgctagtggcatgacttctcccgttggatgttctttgcaagccccctgtccttttcttttgatgtacttactggaggagtttgtaattacttataacacaggcctttcattctacctctctctcctcctgaactataaattctgtaggaatcgggacagggcctcctcacctggcccacagcaggcactcagtaaagaagtgatgaatgaatgaacacattcttcatgtcatctggtgagcatatttaattaaaaatatcagtgctttctaggaagacaaatgagctctgccacaatctttttcatttgaaattctagtgctgattctgactttaaactggtggtgtttattgagtacttgctatgtgccaggcattgttctacacttttcacttgtatacttaaaaaaaaaaaaatcctcctggctgcatttggagtacacagtaaagaacaaaacaccctcacagcatccctgctggaatgctcactttacagctgaggaaacagaagcgcaatgagctcaagtacttgcccgaggccatgccgctggtaagaggtggaaacacctaagaatgaaactgatctgccccttcctttgtgtctagaccaacgatgcaataaagtaagtctaccaactcacagcaaggccatgggtagaggtcttgaaaggcaccatggagcccagagctgagctgactcttcaaactcatcactctgatatttcacttcctgtatgaaccacccagcaacattcctaaactccccctttcttaaaaaaaaaaaagttctacatatacttgccaaatgacccagcaatcccactaatgggtgtttacccccaaataaatgaaaacatatgtcctcacaaagttcacagcagctttattcttaacagctaaaaactggaaacaatctaaacatccatctactggtgaaaggatattcaaattgcagcacgcccatataaggaaatacgactcaacagcaaaaagaaatcagctgctgatacgtgcagcaatgtggatgagcctcaaaggcgtcccctgtgtgaaacaagccagacacaagagactctataagtatgtgcttccatttatatgatattctgggaaaggtaaactacagggccagaaaacagatcgacggttgccaggggctggaggttgcagggtggaaggttcgttgcaaagggtcacaggaagctttttttcttccttgggacaggatcttgttatgtttcccaggctggtcttgaactcctggcctcaagcgatcctctcccttcggcctcccaaaatgataggattacgggcatgagccatggctcctggtcaaggaaacttttttacggggtggagagaaggggctgaaaatttgattgcagtggtggcactatatttgttgccaaattgtacactaaaaaggatgaattttattatatgtaagttagacatcagtaaacctgattcttgttaaaagtaatttttaaaatcttttattccaatgtataaaattggttcttctattcctttccttataaatccaagcaatagtttcattctttaaaaatgcataatgtgaaaatagcattaggaaagctgccttgaaatatggatactaaatgcatcccactgggcaacttcagcaaaccgctgggtcttccaccacagttaaaatagctcctgctgtccccggggcaggagtggcttaagaaagcatttaatccaggagtgcgtgtctggagctttgtgttaatcagattccatatgactgaatgacctttgttttccctctggtggaatcgtgaacatttgggaaaaccggtttgcttttagtgagtgttgcagggtgcaaatgaaactgtattcaacctaggattcgactgggagaaaaacaggagaaaggccacaggattggtgcaaggacagcaggtcagtgtcaggggctaggtgactggggagaaagcttgctgtcccctctgagtgtcctcccccaaacctcagcgtccccccttgggaacccataccatggccccgggcaacagaggcagcaacacaaataaatagaagaactgtttcattaaaacctcctccagacaaggccagctctggatgcagtcttctgtgacctctgggcgagaggaggtggtgtgttaaagacaggattacccctgaggccagtctctgcagcgggacagggacagggcagccaaaggtcagccagggcagcttccagctggagggggatggcaggcctcagcagcaccagcagcttcccagggagaggaagcagctgcagctggcgcaggcaggagcctggtgcgtacccggaggtagcaagctcactcaaacccctgggccatatgatgagctggggggaagctgaggcagcctgggattcctgcaaagtgggtaggtccagagtcacacaaaaaactgctttcttactgtgatatgtatccctccagctggtgtgtggctggggatggcacagaccacaggcacaacttttaagcaactggattctgtgctgcaaaacatgtgcagccacgtgacacctcccatcctccaaaattcctacctgcattacatacaaatctctttaaagatttctgtgtatgtctttctgcctcggcatgcatttcccgggagctctggtgcatagcaactgaattagcatccaggcctgcttaattaataaaatgaaccctgcgtacatctgcaatccttccaaacaatttcagcatttctctcatttctacatggaattcagcctgttagcacaaaaaaccatggtgcaccaaatgcttgttttatcctttgagagaaaaattctttaaaatacaggttgtttcggctgagacctttcaggagtttcttcttctgaactgtgctcactctgcctggtatctgggaaaccccaggcctagcacaaaatagaggcctaatatttgctgaataaactgtgaccttgggtctgttgcttaatctctccccgagccttaattttgccatctttaaataaagagaataataccactcctgtaggactgaagtgaagatagacacaatatatgtaaaacatgcaatacattgtaactgtgaagacatttagcactttacatgtcaaaaaccactgaaaaggaatagagacctgcctgttcatcccagacctgccaccaaattgttggttgaccttcagaacatccccaatctttctatcttgttgtagagacactgacaccggtgacttcaggatttttctctaacattacatgagattatccaggttgaaaagtaggaattgttattcaatttctatagctctgggatcagtgtgcttcctccatagttaaacttttcttgctctgggaactgaccctttttagctatcaaattgatccatgtttttgtaagagctcaccttggtccatctatacatttcatctccacctgagtccagcgccagcacgccaagccctgccggggtctcacagcccccctgagaaacacaaacatgcccatgttcataaataaacactgttgtccttcttgtttttttttttttcctaggaattgctacacacgagttcccttttctgcacctcagtctgtggaggcagggctgtatttatttatttattttgctcgtccattctccttgaaggctatttccctctcgtcatcttttggagctgtcaccctttgtagatcattcttattaagcattaacttggtgaatggatgagcatcacttgggaacagctctgggatattacaaaacataaagcagtcagtgcaaacatctgcaaaatttggcaatccactgtggtttcaatgagctaggggccaagtccttgacaggccttgaggtccttagagaacactgcacaggaaagatttatttgcggaaagggtgagaaatgtcactttgcacttcaggtatgaggtggaggtggtcagcgtttgcaagcatgagtcactgtctaatcttagccttcatgggtgttggctaagctgccctcaccccattccaacaagtccttgtaatggctttgaaagaagcttaaaatccaggatcacttctggaaggagatttgaggagcaggtgccatctctgggccgggctccctaaatctctgggttccagagcttgtcctcccaccacctgggtgctaacaggagcttgcatcccactctgcacaatcgagtgtctctgaggccaaccaacgctctgggccccagcttcggcaccccttctgaggcgactggccagcttgggctgtcgaaggtgggaggccctgacgtacaccaccagcccgcttccccagccagcagccaccgaggcctcctgtgcccactgacgagcagtgacatttcagcgagtgagccggctgagcctcctcctggagtccccagcagtgccacggacactcgcctgtttacagagcatgactttgcttcttgctgcctcacatcctcgttcagcgcagggagagcaagcaggcccctttcccagcaattcctggattctccacagaaactccacagtgatgctgcttgggtttcatgaaggggatgctggtatttggacctttcttctttccctgggcttttaaggcaatgtctcatgcttctaagatcattttcctctgaaggttggaccttgagatattggatccccatttatgatcatggataaaacattccctccagtttcggagtatgtacttcagagctgaggaatgttttctgtactttataaaatcccatatgcgttgaatagctaatatttagccatcactacagggccacatggtgactttcccgggatctaggcaattttgctttcatgggctccttcctctgttcattaaataaatacatatttgtatttgtaaggggtgccagtgcaatttttttacatggatatattgccatagtagtgaagtctggactcggtacatctatcacatcagtacattgtacccattcaatagatattgtttttatgactgtgttgatataagacaaatataattcatggtgggtttattattattattgtattatattcatcattttcttctgattttaatggaaaataaaaaacactttttgttttgtttttgtttcttttgagacggagtcttgctctgtcgcacaggctggagtgcagtggtgcaatctcggctcactgcaagctctgcctcctgggttgaagagattctcctgcttcagcctcccgagtagctgggactacaggcatgtgccaccacacctggttaatttttgtatgtaaaatagaaaacacttttgggggccctaaaattgtcgtgggtcctgggcactttttccactgagtctgtggggtgagtcagcccctcgtagaggctgcccgtattcttggatttggtcttgcagcctcaccaggagcccagaggttctcagtacctgcactgcagcaccaagctggttgcagttttctattccaattagcaatgtcccatggcttgggttcgtgtctggtttatctttgaatcccatcctcacttctataccttctgtagatattcaacaaaagtttatggaattaaactgaagttctaagataaaatttcacagccacatcccaggaaggtttggggagtcagctaatgacactaactagggaccacacgcacacagtgccgtgagatcatccagaagacaaatgatggtgctggttccttcacaaccacgtggtggagacacaccaggggaaaagccttctgcttaggccacggatctggagccatcagcctttccttgacccccaactgcaagttcctccatctttgtttttcgttttttgcttgtgaattaaggtgataataataacagcaaccttgttaaaaagaggatggatgtgaagatattaggacaccacatgggacacagggaatattcaagatgttcgttcactattttcagtagtataatcttgtcctgtatccgtgttgaattatcacctacatcttaatggctatatttccagaaatttctgcaatcagctaatatagtgtgtgttcaaaatcgaactccttttcttatattgaaacacataaggtgtgtccttttcgcccatgctgtaagctgtttgaggactgaggctttgcctcttgtttttgttctctcagagcctagtaaattccatttatgggggcaggtgtgacacagatacaccgtgaggctcccaagggactgtagcctgaaggatgttacgtggtggatttaaccacagaagtgaagtggtgtttgggcttgtggctgatgggtttagctcaaaattctatggatagaggctttcccaccaagctatagcatatctacccctttgctgcctcagggacttgccgtaaagagagacaggcgcaggctggggcagcggatgtaaatctggaagcatactttctgcagcacctattggagccacacacaaactgttctatgagcaaacttggaacttctgcagaaataaaaactatggacatcttgatatggtagaataacatttttgagattttattggaaatagtattaaccggttttgaaaatctctcctggtaaatcttccttcttttctctcacctgctctgctttgcctcagggtgagacagcgcagttgtgaaaatctagaaggcagaggggagctgcctctaccttggcttcccgaagcctcgacccactaagctatcgtcaggtgcctccaaggcaaaccagaaagtacaggaagtttctctcagggaaaaacctcaagaatggaaaagaacttcctccactggtgtctagaaaaaacatgctcctcaagactgggaattaaatcccagggaagctggctgagggggatcctgaacattttcctggacagagtcctgagaagtcaagaccccagagagggtttgcaggtggtgctgagcctcatgggagcagcagaaagaacgtcacctctgcatctcagcgcagggcaaagagagcctcatgcctgtggacaggctcagcagatgccccggggggggcctccatggacacaggactcagggaccacatttcctccaacctccttgccacaacactagtcaagttcctgcagttacaacatcaccctgggaaaaatggggattggaatccctggttaaatggaaaatgtgtgtctttcactcaggtagagtagcaccttgaaacagaaattaacttacagaaaaaaatgggaaaagtcctatttctaacactatggaatttgtggttgacactcattttggccacaataacgaagacccatgccaaagatgtgagccccagcagagacaagccttccggatggccaatggcctgggaccggaagaggacatagtatctccacggatgacagaagagtccttttgatcacactgcctgagtctcttgtgaacaagaataagaacttgcaaaaactcctatagtaaatgatagagatgtacttctctttccaaagtaccaatcatttcaaacaaattctcttggcagcttgataaagatttgagttaaagaagccctccaagattgctttatctataacagtcaggactgggtgaacgctacctggctactacagtcaagattttggggcccaatgtaggtacaaccaaatgagcagtctctctatgtgatgaagaatgctgcaccagtctggcttatttctgattcattttgttgctgggcacataccaggtgctgagtaaatacccactgaatgaatgaatgaatgaagccttcttgattgccctgggccaatgaagtctgagcctctctggagccctttgttgctctggggcagtagaactgcttctcgattggcagggcctcatgcagccaagctactgttgatgattctggcccaggtatactcagacgttacagaggactggctggatgacgtccttctgggctgagtcagacagtgcctcattttataaatgactggagtacaggtatattcccagcacaatgcctggctcatgttaggcgctaaacaaatctttgatgaattaaatggtcatgtgctaaaatcatgccagatgaacctgatggctgaatgaatgaatgaatgaatgcagaaaaaacttcgcatccgtcaaggggcagtaggttggcaatctctgatctgggctacttttcacaaggtgcttacatttttaaaaactcccatttctgaagtttttgaatttccagtgggaaactctatgtcaagcaagccagcgtggctaggactcccaggtgctcaggccagagcacaggctggttccccggcgcggggcagtcctctgctccacaacgcactaaggtgcaaaaagtgggatggtgaggagatgggaggagtctctgattatgctcaagagatgcctgagggtcggagaagaatcctggagctcagcaaacaaaatgcagcctagcagataatgcaggctgagttggctgctccttcaagttcgctggggggctggaagagggatcccgttggtcttccggtccagtccctggggactgggatgatgcacgggtgccctctggtggtcttctcaccaaactgcaggctctgaatgcacgggggtctctggctggggagtggcctgtccacccagaggaccagcatcacctgttagggaaagaaaagaatcaatcaggggcagaggagccagagcgccttaattaagtgcctgacattgtggaatgtcttcttagtaagcctatgcccggttagtctatgtggattgattttgtgattacatcttgaagtccggccgccaggagccttgataaaatctttacatctacattaatcaggaaaaccaggtagacccctcggagtactttccagatgtgtccggcagatgaaggcctccacgaagatcagtgttctcggggtcgtcatgaattgtcagatccagtagccaaaaggggctgagcagcaagagtgggggaaggagatcaggggtggggctggcatggacatttggagaccttgctgagaacccagcaaagccaggctctgtggaggggccacaggccttcatccctgagctttcagcagagggacaccccctctctcgagagtggagagatggggtccacacgcaggccactgccagctgacactgaagaatcttcaggattctcccagagaactgggaattatttcacatattagaacttatccttagggggaaaaccaaggctcttttcatccccatatgcagacaaatcatcccatgaagtaatacgtcttttaaacatgtatgtaccaggttatgtgttaacatgatatatttaaccaaagggatgttagaaagcagggaattgcatggttcacaggtggataagacatgtaggtagatgatgtctctcaccaaaaaccacttggattcaggataataatgataaccaagagtggtggcctatagtcccagctactcgggaggctgaggtaggaggatctcttcagcccagaagttcaaaaccagctgagcaacatagacagaccatatcttggaaaggaaaaaaaaatacacacaacaacaacaacaaaaaaaaaaaaacccaaaaacgatttcatatattgggtcctcttcaagaatctggagaaggaaacacttaatccagagcccaaacgatcatagagtttgaactgtttcatcataaaattacagcttatgcccctatgggttcttttgtttgtgcctctacaagtgactaaaacagccgtttaaatattgtggatgcttatttttgcaaaggcaaaaagcatgggttaagcatgctccacttacaataatcactcacccattcaacgggtgacaaagctgaggctcttaggatgtggctgtgtgtttcacgataactgcaatgaggaaggacaaagcgaatctagcgtccctacatcctttcacagggagaatgcttcgctggtgccccctgaatgcacagccacagcaagcacactttcttctggcttcttggaaaagacaggccgcgagaagtgatttctgagaaaagcaatacccctcaatgaaaaactggtcataaaacataaaagaggaactgccctcctctcaccaacagtaatgtgccttctactgtatcctgccttctaaaggcttcaaatggtaaaagagccgaatttgaaacatttgctgcattgaggcaaaattgagcttagccaggatctttatggctcttataaatatttatacttaataacatctgggcctgagctttagtttctaagctcacatttgctcaacaagtctggttgtgtgtgtgtgtgtgtgcctgcgtgtgtgtgtgtgtaaatgagaaatgagtttcaggaggatatctttagtttggtatttttgtttttatattcgtttctcttagcatatcttataagagccaagctagggttggtttgatttattcattttactactaatcaaaaggcacgaagtgaaggaggatgggaaaaaagggcgaatggaaggtgggagctctcttaggaccagctcacacagctgagagttgcgcaagtatctgcaaatgtcaggcccccaaatctacttttgcctgaattctatgattggctgtcccagaggtcctgaatttcctctaaataattgcataatgttctcactttgttttagctaagatgacttagtcatgagaatcaaacaaatgttgtcgagttcttcatgttttccaaaagcttttcaaggacttgatttattatttttgagtaggtcaagatcagccacgtttgcatagccagagagcaattatgtcttttgaacttaaaggacaaatatgagtgaatgcaaatgaagtcagccctcaattttctgcactaggaaaagcaagacgattcaaaaaatcagtggtatttggtttggaaatgggtttgtgcttttaatcaaatccagtactttttaattttgtggaattcactttcaggaaggaaaggaaccttgctttgaaggactgacttggagcttggaagcgcttttcttctctcctcttctcttgtttctcaatgaacaagaagaaggggagaagaaggcttccttgccagcttcaaaggttttagggaaagctgtactgcccttgtaaatacctctgccgcaaaaacagcagtacaattcattttgcaaggggctccccagcaaggatgaacgttgcagaaaaagcaagtgaatactagaagatccatatgtcagtaaagcaaggaattaaaatgttagtgtttcctgcagaaagagtgagctgtcaacttggaaaataattaaatggtaagtgctgtcaaagaatttgaaagatttgcctgaggtaaaccaaaatgcagacaactgatgcataggataacacagcagatacacacggctagatgccagggaggatattttgacatagacaagggaagtgactagttcaaggtcacttgggagttaaattccgcagcttatctccctgtgactgtagtcccctggccgccagtacttacgttccgttgccttgtattgttgcataagcacttagctttgttttctgttcatcagtgcaagtgtgatgctaccaattccattcttagcaccagacttttctgactctaagctccctctgggtgtcaacatcgtctcccttgaaagcagagataagcctacactgtgttattagaagcaaagggtttgagaaaatgttttttccccaccctcagctcatcctccaacatgtgattgaaagtgagagtgaaacagaagataaatgtcctcctccttgacttggaagttggtttttgtccaaaggtagaagtctttggagtgagatagcaggtagaattacacctcattttcctaacgatacaggcactataataaccttggaaaagtaatcctcaacacgatacccataggagtatttctaataagtaatttgaaatcatataacattcctgctgtggtgcagtgcaagggaaccatgaggagattagatttattttctcatgtttttccaaatgaggccgagaggcaggaagaggggcatcgcctacttaatactaatactctgacattgtgtgactatgttcttaggcccagatccaaatggtgctctggctgagagaaaccaaagctgaaagctgagaaccatcaatctccgaagctgagctttttcagatgctttctgaaaactgagtatgcacatgatggctggtgcatcctgcgatttctaaaggctggggactctgggaatgcactgatgaaaagcaatcccaaaaggaatcgacaaaaccgagtctttgaaacagagactcagatttcaggggtaaaacaaatgattgtgtttaatatagaagaaagcaaatgctactttaatttgttagtttcacaaaaattcattatgccagaaggagaaggggatagaaaagatttctagtctagcattttaagtataacaaaaataaaatttgtgaaatatgagtacgaagtatcaggtggaggaaagagttacatgaacagttttcacctttaagtcttgacgattctgttaggcatgctcacttagaaccatagctaccattttggggcacttactggagatcagacactaaattaagtatgtacctgatgagcattatcttgattgatcctgatgacaatcctgagaggcaggagcgagtattcccattttccaaataggaaaattgagattcaaagaggtaattaattttccccaagatcatgcagtttgtcttcggagtagctaggattcaaacccagactcgggagccatcagtaggctgcctgcatcccagaatgcatcactttagtagttcaaggcccctcctccaccaaaaaaaagaagctaattgtggaaccagagcttaattcagacccaggggaaagtttgggccctcttaaaactaagatgactgggtgtggtggctcatgcctataatcccagcactttgaggggctgaggctggacggggggattgcttgaagccaagagttctagaacagccggggcaacatagcaagacccttctctacaaaaaaaaaaaaaagaaaagaaagaaagaaagagaaaagaaaaagaagaaagaaagaaagagaaagaaagaaagaaagaaacctaaggtaaccagccacctgggagccctgttctaataatataggttactgaagagcaggactctacagatttaccaaaaccaatattttaaggatattgtcagaatttgatgagaagaaaagacaaggcttgtggtcactctgaataatccccagaacataaaccagaaaaggcaaggaagagatgttcacaccggattgaacttgggctgagaaagcaacagaagcaaggtctgtaattgggagcaatgggttcactttgagagagcaaagaggagcgcttctgagaagccttggtgccaagaccaatattatcttatattaaaaaataattgaaactgatacaaggcttttgcaggtccaaattcaccatgaccaggagaagaacagggggtggggcaagcagttgaggatagcaaccaattttcagtagcctggggaaggaggagaaggggagccgacgaaattcaatattccagaagttaaagcctcatgcttgtagagaacaaaagaaaacacacctaatggagtagaataataaagggaacactctgcattcagagggattgggtccttcaaagacctttgctaataacacaggggactccatctccttacacctgtggggcattattatttgcaggctactctctattgcaaacctggccattgacaatggtaagaaagtaccaactggacaattgcattctagccttgacaggattaggacccaacgccacctgggaagagaataaggcagcaatagctgggggcccactgcctaggtgctcatttcgccagtgggagggaaattttcggtgtggtctcgtgaatgatgaggtcacccattcccttcctctctccctccctcactctttccagaacagctaaaaagttctgcaaataactctctgttaaccagccacatggttaaggttaacaaagtgagttatttgagtatggctaatggagagttgtatattttttaatagatggctagtttgcagagaatgagaatataccaaagcaattatccataaccattttggcttatgtaccctctaaaatagtctgaaaaactttgtacccccacccatatttttcagttgacatctaagttttttcatcataagtttgtgtaattgcaaaggatttaactttgtaaaattctacaattcaaaatataactgttattaacttccttaaatgtatccaactgaatggtttaatacccaccatcatccacttaaaaaatacaagtacaaactcttgtttaatagaaggaaattccacatcattcccttttctccttgacattgtatctgtattctaattctctttaagagtcctcttaatgtattatatttttgtgtttgtcttgtatactctatcctatggttctgtgataaatatatatatgaatgtgtatgtatatgtatgtttttaaatttgtatgtttaaaacttttcttctggattgagatgccattctaattattaataaattatttgacataacaatataaatattttacaaatttaaaaaataattataagcacaaaactaaaatttttactggacatctgtcttaatgaaatggaagagagtttatagttttttaaattgtttctgtgtttgatgccctggaggattttacacctggaccaatgctgcataataagcctttgttgttgtttgtttttgtttttataaaataggagaagaaaaattttggcaggagaggtgggaaaggagaaaaacaaagccttgtccttagaccaatcaatttttaggagagagaggtcatagaagttgaagagttgaaaattgtttttctttttttcttttttttttttttttttttttgagacggagtcttgctctgttgaccaggctggagggcagtggtgcaatcttggctcactgcaacctccgcctcccaatttcaaccgattatcctgcctcagcctcctgagtagctgagactacaggtgcacaccaccacgccaggctaatttttgtaattttagtagagacaaggtttcaccatattggtcaggctagtctggaactcctgacctcaggtgatccacctgcattggcctcccaaagtactgggattacaggtgtgagccactgcacgcagctgattttcttaaaattatccaaatgcaggtaccagatggaaagatttggtgtagggtcagacagggatctgtacttcagcttgaagatgattgccttaaactgcactggattatcatttactctttctctggggagtcagagaagccagccagaatcttacagtacaggctgacagcagggatgtcagacaagccggtgcacgctccagctctgccacttgctaaccatgtgacttcagcaagatgtaaactccgctgacactcagctccctcttctttaaaatagttccaccacagggctctagaaggattacatggctaatacgtattgggtaatatgtaagtgtgcatgttgaacgtggatgctcagagcatattagtttcctttcctgctatagaagtattcggattatggtcaggcgtggtggctcatgcctataatcccagcactttgggaggctgaggtgggtcgatcacctgaggtcaggagttcgagacaagcctgggcagcatggtgaaacctcgtctccactaaaaatacaaaaatcagccaggcgtggtggcatgtgcctgtaatcctagctactcgggaggctgaggcaggagaatcacttgaacctgggaggtagaggttgcagtgagccaagatagtgccaccgcactccagctgggcgacagagcgagactccatctcaaaaaaaaaaaaaaaaagaaaaaagaaaaaagaaatattcagattttttgaaattagctacatggacatttattctattccctcaactcttaggggcaaagcacctgagaatagtcccctgccattattattcagagtcagtccaccagaaaagaaaatagtcacttcgtgtgtcttcatccctctctcttgctacgttagacatggtaggggagccagtccagccctcagcccctttgctctgggatttgccttcttctcttcctacttcctttttagtaattgtgagtagaaaccccacccatggttgcagagggtcggggatgtgggtgtatagaagcacagtgttgtcaaacttaaagagttgtcttcatggcaactcaaccattatttgggttattatgcataaactacatacatgcatagttactattcacacacttatttgggtctccagtttatccggaagacattaggagctcttcaccctgtccccatttggagggtcagaggaattccttagaagcagagaggaaacctggactataactgaagaccacgggctgtggaatcagaaagatgcaggttcaaatccaagttctgtgacttagttgggaaacctcagcaggtcttttcacccctgtaagtccaagttggcttatgcacaacatgtgatcagtggtgccattttcttcacagggttgtttggagaatttaatgaaacgatgcacataaaacactagcacagtgcctggcataaataagtattcaataagtactggaagttctagccaggaaaactagccaagactatgaaatagaaggcacctagaatggaaaggaataagtaaaactatctacatttgcaaagcagaacatttggtcagcttagaacgttcccatggtttatactgattaacctcatctttgaagtaataatttttttggataaattctagggtataatttgcagaatcgtgttcaaatatgacagctcctgggaagagccttgcgaagaaattgtttgtgaaattgaaccagtgttctgaggaaggaacccaggattactccaccaaaatttgttgaaagatcgatgcttgtatctaaattgtgtatttaatatttaatagaaactcataggacaactaagaatgagattccaggtggttctgcttgtgggagggtgaactagcaaaaagtactcatctggaagatgggaatactttatgttactgtttcacatacacgtgtgagtgaacatagccctcttcatttttttccctgttatttctaattttttattaaagtacaaccactcaagcttcccataatggcacgggaagtccttactgcagtgttgaggacaagatggacaaatccatgtcagctcaggactgtctgttgtcaaactggaagcctgccaccagccctctgccaaatggtccccagcaatggcccctcccagagctggccagtggggcccatgcgtcaatgacctggaagaacagtttccagctgtgtagaagtcccctcgctcaaatcagcagcacttggcagagccagtaagatctgtcacactgtgacatttgcacgcttgggcttggtgtctgaaggattggcgtttagcttcaaatttggtgggagggaacttgaaaagacattggttctgttctccatctcatcaggacaaaaggtcatgggtccccttcagtgtgctgacttgctactgctaagaaacaaaagcaaaagcaaaagcaaaaacccaaacccaaaggtaacaaagcatggcttgttgagcccccgcctgggtaaattgaaacaagcctgtggctgcactgagaaaatactcattttgtggtatcaaatgtggattcctgtttgctttttaaatgagcctctgctctgggccacatgagctcttcatgctctgtactgtggactgaatgtgtatgttcacatatgttcacagtcatatgttgaaaccctacccctcagtgtggatatatttggagattgggccttatgtaggggaaaagtctctcaacctagggttttcctctgctctcacaccaccacaacaatagacttctgtgatgatgaagactttcgtgaccaaaagcgtgtggttttcccccatgcatcaagcagtggacaccagctgggcgtcctccaattcagttccgacagtatctaccgggagatggcatcagatcccactggttaggggctcagtccccaagaatgccccctacaccctcagatgccagttgcaattttgagcctccggaacttcctaccaactggcttcaagttggggtcgcatgactctcttttgggttcaattaatttgctggagcagctcacagaactcagggaaacacttacttatgtttaccagtttattataaaggatattgcaaaggatgcagagaaagagatgtgtagggtgaggtttgggagaaggggcacgcagtttccaagccccctctgggtgtgccagccctccaggagcctccatgtgtacagctgtcaggaagctctcctaacccagtctgcttgggtttttaccgaagccttccttccctcagggtatgaggcaggaccctttgcaaaggagggtcttaagacctacaatcagaaaagtggggaaagattagagtcccgccttggggcaggtgaaaggaaggcaggagagagattctgtttcctgaggcccgtccctgaggcctcacacacccagccttataacaaaagactgtaacaatgggatatgggaattatgagccagaaactgtggacaaaaaacaacatatcataacaccacaggcttctaaggaaataattaaggttaaatttaaatgaggtcataagaatggggccgtgatgccataggattagtatttctcccctaaccccagcacacgagcactgaggaaaggccaaatgagcacatggtaagaaggcggccatttgcaagccacgggagagccctcaccagaaaccaaccatgctggcaccttgatcttggacttcccaacctctagaagagtaacaaaatacatttctgttgttgaagccatctgacctgtggtgttttgttacagcaatccaagcagacaaatgccgtctgagaaacttgtacaagtaggggagctcaggctctcccctggtcctgcatcccttacctgtctctgcctagaagcagcaactcaatcaccctgtcctaaggattgctgattataaacccccccaagcaaatgagactgtctcccaggtaggaaactttgcatgagaatttcttgccatcctactgccatccctcatccgtgggctgctctgactgtgtcctcagtggagacatagacaaaggatttcactttggcaggtgagctctgcaaacctgggccatccacaaggcaatcttctccaggttgcatgattttactaccctctggacttctgtgtaaattaatggtgcaaaatgttctctcatgtcctttccagatctaaagccacagcatttcttctttttattcatctttctttttttttttttttttttttgacagagtctcattctgtcttccaggctggagtgtagtggcacaatctcagctcactgcaacttccacctcctaggttcaagtgattctcccacctcagcctccagagtagctgggattacatgcatgcatcaccacttggctaatttttgtatttttagtagagacagggtttcatcatgttagccaggctggtctcgaactcctgacctcaagtgatcccctgacccttggcctcccaaagtgctgggattacaggagtgagctactgcccctggccttcatctcttcaagagacatcatttttgaggtaaaaatcaacacacacgagagttgagttttcctcaaatataaagtaaatactgtacctatgggtgtatgggtgggaatttacataacgggatgaacgtcctgcactgggtattggaagcacaaagacagataagatggtcccattttcaggggcttaaaatacactagacaacatccaataattagacctcctttttattttaagcttttcaaacaagaagaaagaaacatagcagcagtttgttcttcgacctttcctacctcacttatagagcgctcttcaagcttggaacatctgagcaataacagcaacaaatgctaagtgctttcagcagaactcggcacagagcctggctgacattctaagtacgttgtgcacttgtattaaactactatgctgaatatataaattcattcatggcacatggtgagggttcaacacagcagctattagaaatactgaagatcagcactagctaattatcattttggagctagataggggtagtggttgcataatgttgcaaatctactaaatgccactgaatcatgaactttttttgagacggagtctcactctgtcacccaggttggagtgcagtggcatgatcttggcttatggcaacctccacctcctgggttcaagcagttctcctgcctcagcctcccgagtagctgggattacaggtatgcaccactacgcccggctaatttttgtatttttagtaaagacagggtttcaccattgtggccagactggtcttgaactcctgatctcaagtgatccacccacctcggcctcccaaagtgctgggattacaggcgtgagccactgtgtcaggccttaatcatacattttaaagtgttaagtttctgtgatgtgaatgtcacttcagttttttttttttttttttttttttaaagctaattgccacttgcaccaggtgctgggcaaaaatgcaattaaatacccaggattcgaggctgagagttaccactagaaaggaagaaggaaatcacaaggttaaaataaaaaataattatgtgcacaggaaggcctggtgccccccgagaagagcatacatccacatcagacagtctgcaaacattgaagaaacacactagagagatgaaaatcataggccctagaggacttaggccaagaagcccattcttacctcctctgagcctggacttgaccacatgcaggtcacagagatgcctggtggggtgaagcgggtttcataactttcttccctgtcaccatctactgctctcagagttaccctcttaacttttcccatataatagcatacttaactccggcctcatcactgcctttgcttaatctgtaatgttttctagacctgaaatgcctggcaatgtgcaatgtaatattactcttatcatcactgtgttaccatttgccctttaaaggactttggaaaatgcttttacttttaagtgtaatgctttattttcacacagatggacacacctccttcttcctcttggattcctcccagttgggggattacgccctggtaattcaatcacttggcctctttggcctagtttctatctccctgtttacgtcagaatttcctttcactgcagagtgtgttttctggtcaactatcttgtttcttctgttctgtgcaactgtgggaagacaacacagccaatgccactttaagctcttgtttcttttctttaggcaatgttcgagctttcacactttcttcttagcgccctgaactgctaatttctttctgcttcaatgaaacatacttgtcagtgctcacgaaatgaacctttctgccctgtccactccttattattcaacctctgatgttttgccgtctggggtttctcctcccctcagggccgacggggctgttgttggatttttgtgtgtttgtttcttctccttttgttttcccaacataagcaaatataattttaattgaattaataccacaattttttccttttatttttagttgacacatcataactctacatacttatggggttcaaagctgaaatgtcactctttgtttctttaatcactgttcttgccagcttctgccctccaagcatgttccgtgaccttcagtggatcccaagacatttaggtttgtggctgctcttcagtacacaaaccgtgggatccacagttcgtatcctgatattgtcactcactaatcttttgattctagggctgtttcttactacctatttggcacagttgtgagaattcaataaggttatgcctgtgaaggcaggcagcatatcgtctaggggatagtaggtgttccataaatgtgtgttggattgagagaaaacttattttcatctcatgaaatattttctctaatttgaatctctgaccatacaggtgcacttaaataagtgtgcaagaaaacaggcactcatggtggtaggaacataaattagtacaacctttgtggagggcaattttatcacatgtatacaaactcattgtcttagtccattttgtgttgatataacagaataccacagactgggtaatttataaagaagcgaaatgtatttctcacaattctggaggctgggaagtccaagacagatgacttgcatctggtgagggacttcttgtatcatcccatggtggaaggtggaagggtgcatgaacatgtatgtgaaagagagggcagggaaggggcagaactcatctctttatcaagaacccatcccttcaataatgaactcagtcctgaaataacgatattaattgattcatgaagtcagaaccctcatgacctaatcacctcttaaatgtcccacctctcaatactgttgcactgaggattaaatttccaacacataaactttggggaacacatgcaaaccatagcactctctgtcccagcaatttgaattttagaaactgacactaaggaaataattgatctgcatgaagattttgctatgaggttgtaaaagataggaaaagcccaactgtttttgctactttcacactcagccaaacacagaacccttctgtgaaatgtacgtggattctccagtggacgccaactggatatcctataattcaactcaattctgacactacagaagggtcggattccacaggttgagagctcagtcccataagacttctcccatttcatatgccaattgcaagtcccaggttgtcacctctgcttctgatcagttgaggttcccataaccccctagttgagttcgattatttgctagaatggttcacacaacactttacttacagagaaacactgtacttacatttacccattcattataaaggatatcacaaaagatacaaataaacaggcagatgaaaagatacataggacaaggtttggaagggtcctgcaggcaggagcttctgtccccatggtgttgaggtgaaccaccctcctggcacaaggatgtatttgccaatctgaaagctctctgtgtgccctagttccaggatttttatggagtcctcatcacataggcctgatccattattaactcaatctccagagcctctcctcttcccaaagaatgggaagtagatctgaatattctaagctcctaataatggtttggtttttctggtgaccagccccatccaggagcccacaaagagttgtctcattagaaaaaatgatgctcctaccgtcaaggaagttccaagggattagtggctctgtgtcaaaaattagggccaaagatcaaatatttgaacaaaagatgcacctagaacacctgttgctcaggaatttacaaggattttaggagttctgtgccaggaactagggacagaggccaaatacatatttcttttttgatgttgttgttgttgttttgagatggagttttgctcttgttgcccaggctggagtgcaagggtgcgattttggctcactgcaacctccttctcctgggttcaggcaattctcctgcctcgacctcctgaatagctgggattacaggcgcccaccaccacgcccggctaatttttgtatttttagtagagatgaggtttcaccatattggccaggctagtctcgaactcctaacctcaggtgattcacccacctcggcctcccaaagtgctgggattacaggcgtgagccactgcacccggcccaaaaacatatttcttattgtctcattatatcagaagatattctctgaagccttatttatattcataaaacattggaaacaatttaaatgttcatcagtagagaatgattaaaaagataatgctatattatttaaaggaacggaatacaatcattaaaaaaggtgttatagaagaatactgaaaggtaagtatgatattcataacattttgatggagaaaagaaggttaaaaaaacttggatatttaatagacaaaaattaaacttgtatatttaaaaaacataagtcctgattttcccatactcaccaaacatgctctatctgtagccactacctgtccaattgctcagggcaaaacttcacagccgtctttgatcgtcatagcctatgttcaactaatcaggaaatcctttcacctctaccttctaagcatactgagaatctcagcctcaccagactcatcaccattgccctagggcaagccaccaccatctctcagttggcttattgcaatagtctcctgctggtcttttcactattatgcctcacaagttattctcaacacaacagcagagtgaccctgttaaggcattaagtctcttcatggagctcttctgctcaagagcttcccatctcacacagagtcaaagactctgtaaaatgaccagtaataaatgggctgaatgtagtttattcagcctgtttgttcagccactttgtggcctcccagtacaaggcaggacccctttggaatgaaggtctgatgacctactttcaggggaggtaggtcagaaaattcttttacatcctgtttcaggggagaaaggtgagagaacgtcagagaatgatcctccttttcctgcaattttctcaatttctttcagtttaaaatacttagtatgggccaggcatggtggctcatgcctgtaatcacaacactttggaggctgagatgggaggatctgttgagccccgggggattcagaaccagcctgggcaacatagggagaccgtatctctacataaaatctaaaaaattagctaggcgctcatttgtgttcccaactacttgggagactgaggaaggaggatcgtttgagcctaagaggtcaaggctgcaatgagccacgatcacaccactgcactccagcctgggcaacagagcagaccctgtctcggaaacaacaacaacaacgaaaaaaaaacaaaacaaaaccaaacaaaaaacccaaaaaacaacccaaaacacacaaaaaacacaactcagtatgctaagatgccatattttgaggcactatgttctgagccctgacatagaatataaacctcatgagagagagatttttacctctttagttttactgatgcgtgtatctcctccacctagagcactcaatgaatattagttgaatgtcttgaatgcattagtatgggatgaacctgtttgttaaaggctaaaaatacagttggtcttcatatttgtagacactgtattttctttttttttgagatggaatctctctccgttgcccaggatggagtgcagtggtgtgatctctgctcactgcaacttctgcctcttgggtttaagcaattctcctgcctcaggctcctgagtagttgggactacaggcacccaccatcatgcccaactaatttctgtatttttaatagagaaggggtttcaccatgttggctaggctggtctcgaactcctgacctcaggtgatccacccacctcagcctcccaaaatgctgggattgcaggtatgagcgaccgtgcccagccaatgctgtattttctaatttgcccacttaatagagatattgataatcctcaaatcaatagccacagtgcttccatggtttttcttgaacatgtggagacagcgaaatagttgagtaacccactgtgcacttcttcagctgaggttgaacaagtcatcattctgccttcttgtttcagctctcgtactgtaaacaagtgttttacagatggtctatttggtgccatttttttttgcatgttgatatttttaaaccatgcaataataaaattgcaactccactagccatttattaaaggctaaaaatactagccacttccgtttgggggaaaatcctttctcacctgcatgttctagtcttatgttattttcatgttttgggtatctggaatttctagggtcaaagatacagacatttaagctgacaaggaaagtatcaactttcaacaaatccccagtttagggtttgggtctgttaaaattgttgttattctaaacgttgtcctgatttgctatttcagttccatatatgctaaaatgtaggtaacaccgctccttagtgttaaccgatcactacagttcttatttgcagctattagcacattaaaatggtgtctgttgtttggagaatcaagaaactgcctgtttgcttttctatactcagggtttatgtgatggttaatactgagtgtcaacttgattggattgaaggatgcaaagtattgttcctgggtgtgtctgcgagggtgttgccaaaggagattaacatttgagtcagtgggctgggagaggcagacccaccctcaatctggtgggcacaatctaatcagctgccagcaaatataaagcagaaaaatgtgaaaaggcaagacgggcctagcctcccagcctacatctttctcccatgctggatgcttcctgctctcgaacataggactccatgttcttcagttttgggactcggactgattcttcttgctcctcagcttgcagacagtctattgtgggaccttgtgattgtgtaacttaatacttaataaacttaataacttaataaactcctatatatatatcctgttagttctgtcactctagggaaccctgacaaatatagtttaatatttgtttatcgaatatcttttatatataactataaaaagcccatatctatataactacagatttgtagtaactagataaataaacccttagattgaagagggtggtggggcttacaccttccccctcttccacaatcgatttgaatgtttattgttggtgaactttggcaaatgtgcaagcatgataattgttatttcttcaacactttaacctaaagactatagtactatatgagaaattaaaataaaattaatataaaattctaagccccctaattgactgaacgaactacttcttgaccaagaggaacccagagaaacttagaaactgagctcctggccattgcagaatgggatggcagacatggcttgttataccccctccctcactaaccaccattcccttcctaagggctaaacagaaaccagccttttggaaagatttgctccactactgacttcaaccaaccaactgacccttgctgtatcccctctgatatggtttggctgtgtccccactcaaatctcatcttgaattgtagctcccacaattcccacaagttgtgggaatgacctggagggaggtaattgaaccatggggccaggtctttcccatgctgttctcatgatagtgaagaagcctcatgagatctgatggttttaaaaaggggagtttccctgcacaagctctcttcttttgtctgctgccatgtgagacgtgcctttcactttccaccatgattgtgaggcctccccagccacgtggaactgcggttcattaaacctctttcttctgtaaattgcccagtctcaggtatgtctttatcagcagtatgaaaatggactaatacaccctccctttttgcagtttctgcacaactgaccagcattccttcctgataagagaccactgaccatggaatggctccatccagtttacagaggctatgcataggatgcctctgtttcacttttgcctaattataatgtatttaagtgtaaattctccacccaaaactcaacatgggacatatgtaacatgcatgtctgcttactacacatgtgtgtgtccaccttcatgaatattcatagcttctcctataacctgttgactatatatacatagctggcccattcagcataaattgtgatctcagcctttcctctgaaatgcctgcttgtggtttctaccagaagctacacttcccagcctgtgggttggccagccggcaggctataatccttgataagaaataaagcttttctgggcgggtgcagtggctcatgcctgtaatcccagcactttgggaggccaaagcaggtggatcacctaaggtcaggagtttgagaccagcgtgaccaacatggagaaacctggtctctactaaaaatacaaaaattagcggggcatgatggcacatgcctgtaatcccagctactcaggaggctgaggcaccagaatcacttgaacccaggaggtggatgttgtggtgaacagagatcacaccactgcactctagcctaggcaatagagcaagactctgtctcaataaataaataaatgaaagctttcctttctaaatttatgaacctcgtgatttttcagttgacttggaggagaccaaaaatatgtcactctgtaatatgactgtaggaaaccagaatatgccactccaaaatgttaccagaaaggggtcgcagtccagactccaagagagggttcttggatcttgcacaggaaagaatttgaggtgaatccatacagtaaactgaaagcaagtttattaagaaagtaaaggaacaaagaatggctacttgacagacagagcagtccgagggctgctggttgcccatttttatggttatttctctattatatgctaaacaaggggtggattattcatgcctgtcctttttaaaccatatagggtaacttcctgacgctgccatggcatttgtaaactgtcatggtgaagcagctacattgtcttgggtaaatacccaaggtttgtcatctcacgccaggaaaatttaggacgcagacacacatgaggagtgtaggagtggaggtttaataggcgaaagaaagagaaaggaaaatagctctctctctctccagtgagagagagaggtcttctgaaaggaaagactggccggtggcggatgcgctggattttatagtcaggctggagaaggtggtgtctgatttacatagtctcacagattggtttgataaggtatgatgtttacatagcacgtgggggaggctggctgccccactctaatcttatgcaaatgggctttccagttgactggcaccatcttgtctgctccttagtgtacacatggatgacaaagagaagggaagatggagccaccgtcttgaacatgattggcacaacagccagcatctgtctgcagcttgattttacaggctgctctttgttagaaaggaaaataatttggggctgctttttattaaaaaggaaagcttaccaaggacttctgtaccttcactatctgcctaagtaatttcttcttaactcttgtatcaatggcactggtgggagtgtagtagtgaggacgaccacatgtcactcgcatcgccatcttggttttggtgggttttagctggcttctttactgcaacctgctttatcagcaaggtctttctgacctgtatcttgtgccgacctcctatctcatcctgtgacttagaatgcctaaccatatgggaatgcagcccagtaggtctcagccttaacccagcccctattcaagatggagttgctccgatgcaaacacctctgacaaaaatatattcctttggcataaggattattttgcactgattattttgtgacactgctcaaaataatcataagaacatatgtctattattgcagacatcggaaaagctctgaaaacagagtgggttacccctttgtaaaggaaatttacatatataaaagaaatctccatttgtataatagggtctccctctctgaatcaggaagagaagggtaacttaatcactagagcctcttaacaatggaaaaagcattgacttaagtgtgcatagcaaacattatcattttgccatactatgtactatacctggatacctcttcattttgtttaagttgaagatggtatttaagcctgaactcaaagatgcttgtttgagatttactcattttcccccgggtatctcccacatacacaggaagaatacgtttttaagcttctgttgttttttctcttgttaatttgtattttgctgctagggtttgtctccagtaagtgctatggtgggtatagagaaaattaattttctctcctatagtacttgacaacacttggaagctttttcttcttcattgacaatacaattgcctattagggcattctttctctctctatctctccatcctctgtcccaaaactttgctaatttaggggccaagggaaaacttcccctttgccctctgaggtttcactgaaaaatcaactcaccgaaggcagattaattggagaaaaggtgtaaaaatttattagcattgcaagttggggagaatcacagagtgattgttcaatatcctagtggggcctccatacttacatagccttatttcagagggaagagggagatggggaatataggtaattctattgagggtcaatcaatgattactagtgagaacaagtggatggaggggtagggataaattcataaatcgttctctttagaaatggagtgaacctgagacagggacattatcttgtgaatgggtctgttcagatgtggttacattcttgggcttcttttctgcaatagataaggagataacaggaaggggaaggaaaaactacgctgtcctcagtctggtctttatgtagatagggaaaacgtctctttcagtgtctgttaatctttgagggtttttaactcaaaatactcattgtaccagggaggcatattttagggtgaagtcccttgcattatttcactaaacatcacttttttttttaagtgtagtgttaaatgctacagagaaaaacatgggtgagacaagccagttctctcaagaagctcaaatgggtgagacaggcatggaaacacaatagccttatgatgagatgagttgcccccatcactgactgaattaaccctgatctcagtcaaggaaaccccagagagagcttaaaaactggattccctgccacagtagagagagagttctgacacgtctcattataactccatccttatggagtttaggcacaactgaccagcattaatgttaaaataaagatcataatgttacaggaaaggggtttccatccagaccccaagagagggttcttggatctcatgcaagaaaaaattcagggtgaatccgtaaagtgaaagcaagtttattaggaaagcaaaagaataaaagaatggttactccatagacagagcagccccgagggctgctggttgcccatttttatggttatttcttgattatatcataaacaagggttggattattcatgcctcctctttttagaccatatagggtaacttcctgtcattgccatggcatttgtaaactgtcatggtgctggtgggagtgtagcagggaggatgaccagaggtcactctcgttgccatcttggttttggtgggttttatctgactgctttactgcaacctgttttatcagcaaggtttttatgaccagtattttgtgctgacctcctaactcatcctgtgacttagaatgccttaactatctgggaatgcagcccagtaggttttagcctcattttacccagcccctgctcaagatggagttgctctggttcaaaacgcctctgataataagacaacaaaattgactctttgtgacaataagataaattataaatagaacctaaagccatgccagataagggttaattcacacagccctgccagtcactctgacccagtgtactggttaacagacttccttaccttaacttaaacagtcattgctgctgaccccaaatttttagacaaagctttagtcatttaaccaattgtaaactaaagaatctctgaatccacctctaagcccctgtttcaagatatcctgccttttcagcctgaaccagtgtataccttccgtgtattgatttatgcctacctgtaactcctacttccctaacatgtggataaccaaactgacatgtggaatctgactgccttgggtgcgctttctcagcacttcttgagactgtgtatcgccgggccaaggtcactcatatgggctcagaataaacctctttaaaatattttacagagcttgatttttctcttaacaactcgctgggagcagaaatgcatgtggttagcaaaggcttcaccaagaaggagacgagcgagggggctcttgcagagtgagtgaaactcgaccagctggcagaggaggtgtgggatgcattccaggctgcagagagcacgctgatagagaagcataatacacacagagagctataagtcattggatttgactgacacagcctgtgctgaggaaggggaggaggcacagcagcagatgtggcaagagaaagggaacagggacatataatcttaatttttaaaaataagaactttactgggatgtcattcacatgtcatataatttacccttttaaagtccacaattcaagagtctttaccatattcacagagttatacaactatcaccacttatcattttagaacatattcaacattccccaaaagacaccccatacctgttggcagttatttcacactaccagatcctcccagcccctggaaaccacgggactactttctgactctggatttccctattctggatatttcatgtaaatgggctcttgcagtgtgtggcctttctgactggttccttttgttactagaaaggggtcctgatccagaccccaggaaagtgttcttggaccttgcacaagaaatttagggcaagttcataaagtgaaaataagtttattagagaagaaacaaaagaattgctactccatagacagaggagtggcatgggctgcttgactcagtatacgtatagttatttcttgattatatgctaaacaaggagtaaatcattcttgagttttctgaaaaaggggcgggcaattctaggaactgagggttcctctgctttttagattatatagggtaatttctagacattgccatggcatttgtaaactgtcatggtgctggtgggagtgtcttttagcatgtgaatgcattataatcggcatataatgagctgtgaggaaaaccagaggtctcttttgtcaccatctttgttttggctggctttatcactggatcctgttttatcagtggggtctttgggacctgcattttgtgccaatctcttatctcatcttgtgactaagaatgcctgacctaggaatgcagcccagtaggtctcagcctcattttacccagcccctattcaaaatggagtcactctggttcaaacacctctaacactttcacttagcatgtttcacttaccatgcatccaagtaaaagcatgactaagtacttcatttctttttatggtagactactattagattataaaaatataccctaccacattttgtttatccatgcatcaattgatggacatttgggttgtttccacttgaagtttagcataaagattattttaaagtgaaaacatttgaaatcttgtctaaactttccttatctgactattgcagggtcttttgaaaattgaactgccgttattctccactccagggactttccagtaaggaaacagactgcccattcccatcggcataaagaaaggccagttgagcgttccagcttttccattaaagcccttgggtattcagggagtcactcattactgagtgacttctgcctgcacctgtgaataaagcttgtcttttctcctattagtctgtctattgtcagttcttttgccattccccaaccatggtaatttaagtggatagaggaaaaattttccttccaacgaactttttggttattatgaataatgccactctgagcatttgggtataggttttagagtgaacagatattttaaattctcttgggcatatatctaagaatggaattgctgggtcatatggcaactgttgcttgaacattttgaggaactgccaggctgttttcagaagggctgcagcattttaaaaccctacaagccatgtattgtgggtataaggtggcatgccactgaggtttagatttttattccctaatgggtaatgttgagtctttatgcatttttatactcattcctctctcttaatgtatactgtttgctttgcttgtttgcttttttttttttttttctggagatggggttaacatctgtcatcaggctagagtgcagtggtgcaattagagcacactgcagccttgaactcccaggttcaaacaatcctcccatctcagcttcttgagtacctgggattatgggaacacagctaatttctaaattttttgtagtgatggagtcttgctatattgcccaggctagtttcgaactcctggcctcaagtgatcctcctgccttggcctctcttagtgttgggactgcaggcaggagccactacatctagccctgctttctaatacattaatgcttgtctggattttaaaagagaaaacacaattaactcattcctttccattcacgtcttacttctagccttccattctcagccaatgttttctaaaaggtgagttctatttgtctgactttatttcctcattttatacttatccctccaaggccactatgtcccactgctccaggtgacaccattcacttagaatacaatgggtttgttgcccccagagctgtgtaatggtagctgccctgcccctcaccaactccccttgcatcccttgttatcaggcttccaggacttttgctctcactcttggaaacagtgccttccctggaaggcagagcttcccaactgcatctgctgagattaggcagatgtgtgtcaagctaaggatcccttaggcttcagggctgccaggtgggtccctggaagctggagcatctgagatggttgcatctggcctcaggcagccttgcctggtaccttttggtattatacaagtatcattttctattctgctctggtcaagaactgagaagttgtgccaaggtcatgaatcacctccaaattgccaaatccaacagatatttttttctggtcttcaatgccctctcctgggcccttcctatgtctccagctgcttctgttatcggccaggtctaggcccgttcaaagtaaatcaagcagtgtgacatgggttttgtgaaagagaaaagatttattctcaaggctgccaagcaagcaagcaagtaagcaaccaagcaagcaagcaagcaagcaagcaagcaagcaagcaagagaacagctctcaagtctacctactaaaagataaggcttagggatatttatgggttaaggaagtggggtggccttagaaatggggaaaggtgattggcagtggggaaaaatgaagtaacaggttcattctgcgcaagtgtagtcaaggttcatggcatttcataaacatatatacagaaaatggtgctgttagcctgatctgaaggtggaggttttggccctctgacatcaaaaggccacttctccggcacttttgcaggcccagtggaagggtcagtggtctgatctggtttgaactggacaggaactggaccaagttcctgaaaaacactagaagtgaccattagcatggtgacctgtgaatgttatctataaagtagccagggaaagttgaagttaagtttcagcattcagcagggcaatctttaggtactgtagccatcagcttcatggaaaaaggcgtaaaaattccacaaaaaagcaagcaaacacaatcaagcagggcaggcagacctgattaaattaatctgtccatctcacctctttgtctctctctatcttaaaaaatttttctaagttttaatttttatgggcacatagtagatatatatatttatggagtatatgagacattttgatacaggcatgcaatgtgtaataatcccaccagggtacatggggtattcatcacctcaagcatttatcatttctctatgttacaaacattccaattatattctcttagttatttttaaatgtactataaattattgttaactgtggtgaccccattgtgcaatcaaatactagatcttattcatttaatccaccaaatttttgtactcattaaccatctcaacttcctgtctcaccccaccccccaacaccccttcccagcctctggtaaccatctttccactctctatctccatgagttcaattgctttgagttttagcttccaccaataagcaagaacatatgaggtttgtctttctgtgcctggcttatttcacttaacataatgtcctccagttccatacatgttgttgcaaatgacaggatcttattctttcttatggctgaatagtgattcattgtgtatatgtatcatattttctttatccattcatctgttgatggacgcttaggttgattacaaatcttggctattgtgaatattgctgcaataaacatcgaagtacagatatcacttcaatatactgatttcctttcttttgggtatattatatttagcagtggggttgcttgattgtatggtagctctgtttttagatttttggggaacctcaaaactattctccatagtggttgtactaatttacattaccaccaaccgtgtacaagagttctcttttctctacatcttcaccagcatttgttattgcttgtcttttggataaaagccattttaactggtgtgagatgacatctcattgtagttctgatttgcatttctctgatagttaataacggtatgtaccttttcatatgcctatttgcctgtttgccatttgtatggcttcttttgagaaatgcctattcaaatcttttgcccattttaaaatcagattgctggatttttactattgagttgtttgagctccttatatactctggtttttaatcccttgtcaaatggatagtttgcaaacattttatctcattctgtgggttgtctcttcactttttttattgtttcctttgctgtgcagaagctttttaacttgatgagatccgatttgtccattttttgctttaggtattacacaagaaatctttgcccagaccaatgtcctggagagttttctcaatgttttcttttagaagtttcctagttgaagttcttagatttaagtctttaatcctttttgatatgatttttgtatatggtgaaagaggggggcctcgtttcattcttctgaatatggatatccagttttcccagcactatttattgaggagactgcccttactcaatgtatgttcttggcacctttgtcaaaaataggttcactgtagttgtatggatttatttctgggttctctgttctgttccattagtctatgtgcttgcttttatgccagtgccatgctgttttggttactagagctctgtagtataatttgaggttaggtaatgtgattcctccagttttgttctttttgctcacgatggcataggctatttgagtcttttgtggttccatataaattttaggatttttttttatttttgtgcagaatgtcattggtattttgatagagattgcactgaatctgtagactgctttgggtagcatggacattttaataatattggctctccagtccatgaactgaaatatctttccatttttttgtgtcctttttagtttcttgcatccatgttttacagtttttattgcagagatcgttcccttctttggttacgtttagtcctttgtattttatttgtagctattgtaaatgggattgctttcttgattcttttttagatttttcactgttggcatatagaaatgcttctgatttttgtattttgatatgatatcctgcaacttctctgaatttatcagttctaataatttcatggtggagtctttagctttttccaaatataagatcatataatctgcaaacaaggataatttgacttctttatttccaatttggatgccttttatttctttctcttttctgattgctctagctaggacttccagcattgtgttgaataacagtggtgaaagggggcacccttgtcttgttccagatcttagaggaaatgctttcagtttttcctcatttagtatgaaactagatgtggtctctattctgttccattggtctatatgtcagttcttgtaccaatactacgctgtttaggttactgtagacttgtggtgtagtttgaagttcagtagcgtgatgtctccagctttgttttttgcttaggattgtcttggttatttgggctctttcttggttccatatgagctttaaaatagtttttttctaattccgtgaaccatgtcaatggtagtttaatgggaatagaattgaatctataaattactttgggcagtatagtcatttttatgatattgattcttcatatccatgagcatgggatgtttctccacttgtttgtataagaccgcacagctacaaccattggatctttgaaaaacttgacaaaaacaagcaatggggaaaggcctttctatttaataaatggtgctgggagtgctgactagccataggcagaaaactgaaactaatgtgaagattccttaaagaactaaaagtggaactaacatttgatccagcaatcccactactgggtatctacccagagaaaaagaagtcattacatgaaaaggagacttgcacacacatgtttatagcagcacaattcacaattgcaaaaatgtggagccaacccaaatgcccatcaatcaacgagtggataaagaaactgtgatatatatacacagtggaatacaaaggaataaattaatggcattcacagcaacatgaatgagattggagaccattattctaagtgaagtaactcaagaatgaaaagtcaaacgtcgtatgttctcacacataagtgggagctaagctatgaggatgtaaaggcataagaataacacaatggactttggggactcgggggaaagggtgagaagtgggtgagggataaaggactacaaattgggttcagtgtatactacttgggtggcgggtgcaccaaaatctcacaaatcaccactaaagaacttactcggccaggcatggtggctcacgcctgtaatcctggcactttgggaggacgaggtgggcagatcacttgaggtcaggagttcaaaaccagcctggccaacatggtgaaacaccatttctactaaaaatacaaaaaaactagccaggcgtggtggtggttgcctgtaatcctagctactcaggaggctgaggcaggagaatcacttaaatctgggaggcagaggttgcagtgtcactgcactccagcctgggtgacagagtgagactccatctcaaaaagaaataaataaaaaataaaaagaacctacgcatgcaaccaaacacttgttcccccaaaacctatggaaatacaaaatgttaataaataattaaagaaaataaattcaataccccttcatgataaaaccctcaaaaaactggatatggaaagaacatatctgaacacaataaaagacatatatgacagcctctaatgatcctttgcatttctgctgtatcagttgtaatgtctccttttaaatctctgattttgtttatttgggtcttctctcttttttttcttagtctggctaaaggtttgtcaattttgtttaactttttaaaactccgactttttgttttgttgatttttcatatttttttgtttcaatttcatttattttggttctgatctttatttcttttcttgtactaatttggggtttgatttgttcttgctttcctagtttttaaagatgaattattaggttggttatttgcagtttttccacgttgttgatgcaggcacttattgctataagtcttccttttagtaccactgtgtttggctgttcttatgttgctgtaaatacctgagactgggtactttataaagaagagagttttaattggcttgaggttctgcaggctgtacaagcatggaactggcatctgctcagcttatggggagggctcaaggagcttttactcatggcagaaggcaaaggtggagcaagcataccatatggcagaaatgggagcaagtgagagagtggtaggggaaggtgccacacacttttaagccaccagatctcacatgaactgagagagctcacttatcaccaagggcatggcccaagccattcattgagggatctgcccccatgatctaaacacctcccaccaggcatcatcttcaacattgggaattacaattcaccatgagatttggcagggatatacattccaactatatcaaccgtttttgctgtatctcataggttttggtatgttgtgtttccattgtcactagtttctagaaattttttgatttcgttcttaatttctttattgacccactggtcattcaggagcatattgtttaatttccatgtgtttagatagtttccaaagttcctcaagttattgatttctaattttatttcactgtggtcaaagaagatacttcatatgatttcagtttttttgaatttttaaagccttgttttgtggcctaacatatggtctatccttgagaatgatccatgtgctgaggagaataaccactttgcagtcattggatgaaatgttctatgaatttctattaggtccatttggtgttgtgcagattaagtcttacgtttctttgttgattttctgtttggatgatctgtccaatgctgaaagtgaggtgttaaagtctcctgctattattttatcagggtctatctttctctttagctctaatgctatttgcttcatatatctgggtgtttcagtgtttggtgcatatgtatttacaatttttatatcctattgcttaattgacccccttatcattatgtaatgacttgctttgtctcttttgatagtttttgtcttgattttatagtttttatattattttatctgataaaaccatagctactgctcttttttggtttccatttatatggaatatatatttttcattcctttgttttcagtctatttgtgtctttataggtaaagtgtgtttcttgtaggcaacagattgttgggtcttgtttccttattccttcagtcattctgtgtcttttgattgaaagtttagccaatttacattcaacgttattattgataagtactattgccattttattatgtgttttctggttgttttatgctttcttccctcccttcctccttccctctctccctccctctctccctccctttgaaagtggtttcctcttatggcatgttttaatttcttttttttaattttttcagtatctgttttatttgatgttaccatgaggcttgcaaataacttcttataactcattattttaaaccgatgataccttaactctgattgcaaaaatgaacaagcaaacagaaaactaagaactctaaactttaactttatctcacctgctttttaactttttgttgtttctatttatatcttattatactgtctatgtcttaaaaagttgttgtacttactatttttgataggttagtcttttagtctttctacttattatatgagtaggttatacaccacaaatacaattataacatgctgtatttgtgtgtgtacttactgttaccagtgagttttatatcttcagatgatttcttattcattaacgttcttttctttcagattgaagaattccctttagcatttcttgtagaacaggtgtggtattgatgaaatccttcagctgttgtttgtctaggaaagactttatttatccttcatgtttcaaggatatgttcactgaatatattaaagtataagagtttttttttcttcagcactttaaatatgtcatgccactctctcgtggcctttaaggtttccactgagaagtctcctgccagatgtatttgagctcctttatatgctacttgtttcttttctcttgctgctttttaggatcttttcttcatccttgactttcgggtgtttgatcattaaatgtcttgaggtagtttcgtttgggttaaatctgatttgtgttctataaacttattgtacttaaatattgatacctctctctaggtttggaaagttctctgttatgatctctttgcttttttttcctctgcctaatcactacaagttcctcttattctacatttatcagttattttttgtagatgacttagacttttatatctcctctgggctccaaacttgtgtatacttactgcatccttgaggtctcttggatgtttcaaagttacctaaaaaagaacatgtctaaaattaatttagcatctacccccactcctccaactgatcttcttccagacttccctgcctcagggaatgggagcattattcacttttgtgcacaggaaagtgaatcagctgtgatctcttgtgctcaaatcttttatgttcaagtcctgttaaggatagctctttaatatttgttttctccatttccaggaccactactgagtttatctactcccatctcctacctgtaccactttctatgtctgtcttcttggctccatgaccttgtaaaccaaaatgtatgtgagacaagtctcaatcaatttagaggtttattttgccaagtttaggaacatgcctgtgacacagacttaggaggtcctgacaacatgtgcccaaggtgatgtggctacaactgggctttatacattttagagagacctaagacatcaatccatacatgtaacatttatactggttccatgtggaaaggcaggacaactgaaagcaggagcttccagttcacaggcagattcaaatattttctgattggtaattggttgagttattatctaaacacctggaatcagtagaaaggaatgtctgggttatgataaggggttgtggagaccaaggttattcatgcaggtgaagcttccaggtagcaggcttcagagagagtagattgtaaatgtttcttatcagacttaaagagtctattctatcagtcttcaggtctgtgctgatgttaatggtaatgaggcatgtctgactcctccttcccatcatggtctgagctagttttccaagttaactttggaacgctcttggaagagaggatggctcctttcagattgttgtggggcttataattttatttttggtctatacccttaactctccagactgcagccagcatgatgtttttgaaatgaatatctgatcacatcaccatctctacctcctgcttaaaacctaacagtgatgtagggaccaggacgcttggccccctgaaggtttgctgaaattcaccaacatgagacaggttgattaataggagaaaaagcatacagatttatttaatgtgcatacacaggagccttcagaatgaagacccggccccccactgggatgcagagacttatataccatcttgagattacagaaagaaggtgagctcagagcataaccaaaaacaggttatggtggtaaatcatgtagtggcaaggctggttatgggagggggcgaagaggaggcttggctagaaaaggtggtcttgttatgcagatgaaacctcacaggtagcagctctcagagggaatatatggtaaatgtttcttttggatctttagaagtgtcagactcagttaatctgtcctagatctggacaagggaaggcctggctgcgttaatggagattctctacagatgcaaatttcccccacaatagatggttttgaagggccacttcagattattctccctgtggcagccatctcaaaatatgtacaaaaattatattatggggtatagtttgatttccttcagtaacttctgattacttaagggataaaggtaaaccactgctcagcctgtgaggccgacctagcctgccttcctctagggtttcccacaccatgctttctccacactggccggatgtcagtcccttgcgctggccccactccctttcaccaccaaagctttgcacaagttgtcccccagatactcttttctttcttctttgtctagttaactcctactcatccttctaatctcagctcaaggctcacctcgtcttagaagactttcctgagctccctatctccactaaatttccatcacaccctctcgtagtacccttatttctcctttttaatacttctcatagctgaacttttatttgtgcccttatttgattaatgtttatctacctctagattacaaacttcagaaggtaggaggatttatttgattctctgttgcgtactcagcccatagcaagatgcttggcgcattgtgggtgtttcatatttgttgaatgaatgaatgaacaaatgccatactaagatgtttgcaatttatcccttgggcttcattgaaagaatgtaagcagaaaatagattatttaagtttaaacaagaaagctcagtgaactgttttgagacaagatgggcacaggttggaaacagacccgtttgacacctgtcacaatagcgcagttgagaaagaatgagcacccagccaaagtagtcccagtgaggctgaagcgtagagtggaagtgatcatgattagaaggtaggacagatagaacttagtgactctgtgaggtggtgaaactgcctttgccaagattataacaccctttccccaaataaacccccttcttggctgggaactagactgcttttgtaggactaacaaatttgccacaagattagaaattatggtttaggagtcatgcagctagaggccacaaagttctaaacctccccagttgttcctagggataacatcactattggaaaacctaagattggggcttgagttattttttcaggccttgcactcaatagatcagctagtgtcacccagatcaataaaccgactcatctgatcttctggtccccacccaggaactgactcagctcaagagggcagcttcgactccctatggtttcgtctccaacccgaccaatcagcactccccacttctcaaacccctacccaccaaattatccttaaaaacccaaatcccagaattttcaaggagactggtttgagtaataacaaaactccagtttctggtacagctgggtctgactgaattaaactctattgtaattgccctaccttgatatcttgataaatcagtttggtctatgcagcaggcaaaaagaacctgttgggaggtttacagtggctgctgggatggagggaagtacaccaatgaatccagggtacgtagagacagaacagctttgtggcaagagagactgcgctcagtttgagactcgatgaatttgaggctcctaggagacaccctgcggaagatgtctaatgggtagtcttacattttcagcctttttcacaggttttttctctgcctagtaataaaggctaggtttattcttcttttaaccctttttgcatttagaaaaaaaagtgcaactcgctgccagcactcatttaattttataataaacatgccctttgaggctgaagcaaattggactgatttttaaggtgaaaacaaaacataaaaattgttcttggagttattgctacacagaactgacatgagaactgcctgaatcatcagaaacacgtatttcagaaaaatcagattcgtcaaatgaatctttggccaacaactgttcgagaatgatgtgaacagcatgtgtagatatgctatgttttctaggatttgacattttcagtgatcgagaattactatattttgtaaatggaaataccactactggaaacagaatgctatagataggatgatgtcttttgtttccaaagttgatataccagagagatgcaaaaataataataaagtgagatttcatggcaaagttatctcgtggtaaatgctgcagccacaagtgctgcccgtgaatattctcagggaaaatgggaaaagggctaaaagcaaaacatttcttggaaccttattcctttactcctcttcttaacaaactgtctttgaaagggcagacagcacatgctctgtctgcatctgtttaactcctgttcactcctctactccccattctcttggcatcgctgaaactgccttcaataatgagcccagaagccaaatctagtgcacccccagagactgaatatacaaaaggacaatatccagaccatatataaaaatagaactttgatccacaacctgcagcaacatgcccaggaaatcaaccccttatttacaaaaaaacagtctaggaagccagcttgctatataagtcagacttgcaggaagccagatagctatctttagtgacaatccagtgaaataacttttatacctactggccacaaatggccaggacttaattaatgactgaaataattggcaattggcatcttcccaatttttttctcctgctctcaacttagagccaaccagagaaagccaaacatgctccaaccaatcatacaggatgccccacttctgattagcctgcctacagcttcctcatgccaaaagtcaccaatcagggtgcacccaagccttccattttttctactctaaggcgtttcccatcctctgcctgtctctgagtctctgccaaaacgcaagtgatggtggctgactcccttactacagcaaactcggaagaaatagcctttgcctttctcatttagttggtcttcatttattcccacaaccctccacttcttatcaaaatcactcagctgcacttaacactactaatcatgccctccttgaaattgtctcttccctcagctcctgagaccccaattctgattcactgtcatttgtgtgtatgacatcttcgtatccttcagggtctctttctctgccaggggcatccagggttccttcctcagcctccttctctactcacgttcatgtctccttgggtaatggcatccactctttctcaaccaccactgttgcacttattccctaaatcactgtgtccagcccagacttgttcctaccgactctctcctccctgaggctccacaagcacctaaactcaacatactcaaagccaattccccctaccccaacacatacacacatataaacatggtgcacccttcccttcccacctctgctggtcataccatacccaccatatcacccaagtaaaattattaatttgtactgattgatttggcctcttaaatatttccttggtgcatttcctcttcttcatctctatttccactgtccactttaggatgtcactatctcttcccaaaatattacaaaagtctcctaactggttttcaacttgccaggcttgtctcctttcgaacagccttccattttcttcacagagtcatcttttcaaaatatccatctgagcatgtcatgccttgcctacaaccctcttcattatttagtataacatacaagtccccacgatgttctcctccgccatgtttcctgtcatacaagactttgaacttgatgctctaagcagatacatcacactgtttagactcctgaggctgtgcaaattgtgagcatgtcccttggtggtatcaaagcaccaatgatattctcacttgtatcctcattggtgacctgcggtcttagcttggcgtccctagagaatgtttatggccagccgcttgatctctgtgaggaggtctctgctcaggtggctagctgcaaggaggaccacgttggactgaattagttatgatttgcgagcttccaaattctctttgtcagaagccctagtttatacttggcttgcaggtgtggctgaaaccaaatgaaggactatctagggcttcccaaaagaaggggaatttcaaactcttgccctcagaatttttcatcttctgcacaaatggagtctctgcttatacttacagatgtggtcctttcgctcccatgaccccattgatgtatccatatcaacggataaggggtgcagcagggtctctgctctccagaggcgggcgaaagccttcccagcaggcatttactgtcagccaaaccagcaggaagaaagaaagtcaatatcagagggcaactggctgattgttaaagctgggcctcgtgtgggagaaagataatggtctggtgatttcacacgtaaacatttttaagatgccgatagccagcaggcagcctttcacatcagatatctctgaatggcatcagcatttgggggaaggctgggagacaagaaactccccgcttcaactagaaaatatcgtaacttttattgaagaaaggaacgcctcattctccaagtgccagaccgtgccttcctgatttacagcaggactttggaggctgactactcaaatataaagttaccgcagctgcctccctgtttgtgtggaatgatgaagtggaaggcaatagaggagagtaaatagagctctaggaggccagtgctggccgggaaggaggtcccaagttacagccaaccattaagactgacactgtgggatagggtgatggttatgaggacagaagatggcagacgccgaggaacggggaggctgcccacactggcgggctggctgcggggtgtgatgatgctggcttacaccaacacacatatgcgcgcacacacacacctgtgcacagcacacacacatacatacacacctacacacacagacatacacacctacactcacccacacctacacacacacctacacacacatacatacacacctacacacactcctactcatacacacctatacacatacacacctacatacattcacacctacacttatacccacagctacacacacacatacatacacacccacacacacaccacatatacacacctacactcatacacacactacacacacatacacacctacactcatacacacctacattcatacacacctacactcatacacacagctacacacacctacacatacacctacacacatacacacctactcgtacacacctacacacactacacgcctacacacctacaccaatacacacctacacacacccacacacatacacacctacactcatacacacctatacacacctgcacaccacacacatacacacctatacacactccctacatactagacatctacacacacctacactcatacacacctatacacacactccctacacacatacacacctacacacatacccacactcacacatacctatacacatacacccctacacacacacatacacacatacctacacctacactcatacatacctacacacactgcacacctacacacacatatctacacacacctacacacatgcacacctacacccatacacacctatacacacctacacacacctacacatacacacatacacacacctacacatacacatctatacacacctacatacaactcatacctatacacatacacacacacctacacacatacacacctataacacacatacatatctacacacatacaaacctgcacacatatatgcatacacacctatatatacacacctacacacctacacatacacacctacacacatacatacctacactcatacacacatacaaccctacacacatagacacctatacctacacacacacctacactcatacacacctacacacacacatacacacctacagtcacccacaactacacatacacacctacactcacccacaactacacacacatacacacctacactcacccatacctacacacacatacatacacaactacactcatacacacctatacacacatacacacctacatacattcacacctacactcatacccacagctacacacacacatacatacacacccacacacacaccacatatacacacctacactcatacacacacctacacacacatacatacacacctacattcatacatacacacacctacattcattcacacctacactcatacacagctacacacacctacacacactctacacacctacacacctacactaatacacacctacacacacccacactcatacacacctacactcatacacacctatacataccccctacacacctacacacctatacacatacacatcacacacatacacacctatacacaatccttacctacacacctacacacacctacactcatacgcacccatacacacacccctacacacatacctacacacacatacctacactcacacatacctatgcacacatacacccctacacacacacatacctatacctgcactcatacatacctacacacctacacacacacctacacatgcacacctacacccatacacacctatacacacatacacacctacacacacctacacatacacacctatacacacctacacacacctacgcatacacacctatacacacataaacacctacacacacctacacatacacacctatacacacatacacacctacacacacttacacatacacacctatacacacatacacacctacacatacacacctatacacacctacatgactcacatacctatacacaaacacacctacacatacacacctatacacacctacatgactcacatacctatacacaaacacacctacacacatacacacctataacatacatacctacacacaaacctgcacacatatatgcatacacacctatatacacacctacacacatacacacctacacacatacatacacacctacactcatacacacctatatacacatacttttacacacctacacatgcacacatacacacttacacacatacatacctagactcatacatacacccctacacacctatacacacgcctacacacatacacacctacacctacacacacatacactcatacacacctatacacacactcctacacacctgcactcatacacacctactcatacatacacacctacactcatacacacctatacgcacatatacccctacacgcctacacacacacacatacacacacacatacatacacgtgtactttcaggataacaaggtagtgactttactggaaactctagcaatggcaccgtgagctgctgctgtgcggtgggaaatttggaaacacaggagtagctgcggtgcagggtctgagctccaaagcttctcccaggcatccttgggaactgcaggacagtgaacagcaaatagcccgcctgccagctgtgctctgacttcctccagatggtgtctggtcctctcataggggcctgtggtccctcctgcgaaagttcactttgaggatcatccccaaattccagacttgaagaggcacagaggtggccgaggcacagaggtggccaaggccagagtttgcccagaggccagtttggatttagggccacattaaggggaggtgagaccatgagtgcttatggtggagaagccacatggatttcaagcagtggatgtgcctctggggaggacagcaggttaaggccagggactgaacttggactgccagtggtttacctggctgtttttgctaaaacacaactgagtggaactatgcgctgggaggaggcaggtgccagcagttagagcctggcttggccccgtgagaccctggcctctcttttgcctggaaagttcctatccattagagcaagccctgctgacagattggggacagagctgagttggacaatcctgagtgtgactaatgggagtgatcacttaggtgcaagggcagccactgtccctggactctggttttaggaggggccatagaagctctgatccaccgatcctgaagacagctaaagcccaacagtgaacagacatctctctggcagctggatcatccagggccagagttctcggctgtccccacccttctgaagccatctgtgggcattggggagactcaggttacataggtgctccttgtttctctccccttgctgggttttcatcaggttttcttctgatgaaacatattgagagaggaatgctctgttgtaagaagactctgagaggcgacaggattaagccacacaatacctctcagcaagatttttgcagaaaagcatattgaagtgtgggcatttcaggagaagccacaaaaccacaaggcagaagtcctttgagcaaatcagcagacaaatatgttaggatgaggcttcccttccatcctgagcagaacattttcagttttccaatttaagaaaccaaagtgaactgttaccttcctctataaagaagaaacaataggagcttctcatgaagcaaaaaaaaaaaaaaaaaaaaaaaaaaaaggcttgctcagaaagatagcagagaacttagaaaatgttatttaaaaatggaacacctgagacagtaggaagagaggacaccatgtcaagagaagaaattgcaaacgtctgggttggtttggacttggatttacttgttgaaaatgaaaggatatttcatattctgaacgatgagccagccacgctgacaagttcactgcttaatcagaggaatccagcaaattaataggtaattctgatggaataacaaaacctgtctcgggtggaccataaattatcgccctgctgtaagggaaaggtgacaatgtggatttgtccaggaagaaggagggagagaaatattttcagggtcagtggatttctctctcctctctgtctctctcgtctcagaacaacataggagagaacaaggttttccccgtgagtggcgagctaataagctttgtgagcaggaggttctatgcattaggaaaggattaacccatggctagctcctctgtttgcacaaggaggtggccctctgctattgctgtgaaggagcaattggaatccacagtatttcagaagggcctgaggtctctaatgctccctcaagagccatcctcccagccctgcttcctccttagctagctctgggacctggcattcggcaccgtttcatttttacagctgcctaccccatcctgagcacatttgcacagcaaggagacgggccagttccctgggctctaccctggcctcgttagggctgacttgaagcctccatctcgccgattctgagcgcctctgtgttctctgtgtttgcaccgattgttcccatggcttggaatatcttcctcctctttctcttggctaattcctgctaatctctcaggccctctcttagggacactttcttcagaaagcctctgattgcccatggcagttagatgacttttcaaagtgatcccacgtgtctgtcttgggcgttcctccttcacgaccctggtcatgctggacggcaactctctacttctttctcacacaggcctgtgagtgtgggagcggcagtggttaggacttttgttgtgtggccccagatccagcagagggatcggggcatatgataggaacttgctggaggtgggagcagaagactcgcctacgtgacagatggtggggagggcgttgcggggtgtgtcggagagggcttccccaggctaaaattccttttagtagtacaggttcagggtatgtccttccaggtggtggagaataggttctccaagaggattttgaaagtccaggaaagaatggacaatgatgtgtgaaaattagaagattcttgggaaaggctccacctcctgcttccaacaagaatgcacggatggagccattgatgacatcttatgataataatacacttaccctgtcacagggggactgtgctcctggatggaaaatgtggaggagaccaagacccatgtcaaactcataccaaaatgtgttccacgattcccacatagcatctcccaggaccagttttgaggaacacactttgggagacattgatatttcctttccttttaaactttacaaatgatacctcagttttaagactgtggaaacttcggtctcttcagcctttatttcttcctttcctcctttgctctcttcctccctccctccttggcttctcgctctttctttctctttccttcctccctctttctttttttcttcctttccttccttctttctttctttttctttctttctctttatttctctttttctttctctttctttcttctttttcttttctttctttctttttatttcttctttctttttctttcttctttctttctttttctctccttccttccttccttccttccttcccccttccttctttctctttctttctttttctttcctctctctctttctttttccttctaggggtttactaagggtgacatttgaattgttgtaatagagtgggccacaagtgtatttgcatgtgactgatggctggcttgcaagcagcctgcacggtctccacatgctgagagccagtctcaggctggtagtgatgctgtgcccctgacaaactggtgttctgtcatctgtgagtgataaatcagtcaccccaccctgtgaacatccagggtaaaagatttctcactagatggaagttcttaagaacaggaattgtgctagtttatctcagcctccacagtacatcacccgtcgtaggtccttttaacgcttgctgggttaatggacatcgtgcaatattagtgcatgacaagaggtaaaatctcacagtaattaaagatggcagagaggactcaggaaagccttccagctcagatcccaggagtcaagccaagagtaccatggggtgcatgtaccattgaacaggcagatggtagacacacatcctcaagttagagactggaagatgccatacatgcaatgtcttgctacatgtgggtgtgtacatcagctgaaccctggactaagagtctcagaataaatggcaaactttccagcttgagatgtattttcttgtctttaaagtcttctgatccatagtgaaaataaacatagagaatgaagtttctcttttctaggctcaaatgaagggccttccatgttgttggcactcactcaagaaacatttaaatgaatgatttggaagtgcaggcaagctggctgggacatctgtcactgtgctgatggccagcatggatttggtcggtccagctggctgggtgtggcttcttgtcttcccctggtgctcctcctggagcttggtggggggcgtggggggtggggggcaggctaccttctaaggaagagcacagcttttcttccatttaggagatgttataagaacatttccaggatgctcctacacctgttttgtatttgttacccagttacttccatttccaggtctgccttccctgtacatgagtgccaccttgcccactacccatccaaatggccaggagttgtggaaggtccttctttcccaattcccatatgtggcagttttatcatttccaatcccagacttgtgcttgaggctttcacgccaaggcccaggttttcgatggcaggtttttggcagagctgccagcctcgtaaaacaaggtaatggtctttaggaagtaatcactttagctattgtttcccagcagttgccagagagtctagaaaggacccagtgacttcacgacagtacagtacagcaaaagggagaacagcagctgcagcagcagcctgtggatggcagggaaggtgactgctaattttacaggcacttggagatattctggcaccttcataggacaccagggaacctgcagtcacttttgctggctgacttttcaatctcctagcattgaaaagctcgacaggaaagaacttaaatccattgtacagttttgcaattttctctaaggccaatattacacatggaatgcctaatgggaaattgctacaaaagtggcagctaattacaggttagtggataaaacaacacccttctctggagagcctgtgcacgtaggttgaaggataaaatagggctgaatggtatttggtttatttgtatttatccaagtcagtggcccaggcaggaacgtaatatatgacaagggacatttttgaaatagctgtttttgaattatgctcatgaaatacacactgtgctatggaggacatgtgggaaagctacactctgaccgcatgactaatttttaaagccttgcatagagagaattccccctaagaacacagctgggctattccttcgtgaactgaatgtgtcaattgtgaattgaactaaggtgaaattttactccaatatggcaaatgaactgaggagcgtacccttcagctaaggtattatgtagtagttcatacaccaagtactattattttattaactttaagaacatgttttacataaaaacaggcaacatcaaaaaagctcagttgataaatgaacataatatatcacagatgatttcattccacattaacctacatgtatcagcttaaactgaaggattagggggaaaaattggatctcattccacctttaattaaggacacaaattgtttgaaagttatttcattaggattctgaaaatcaaagattaacctatgccatctgatccatgcagcaagtgataaattcagtattttcaaaagaaatattgaatttttttcttgagtcaaattgaaacctttcagaaacttgtttaaatgcgccaagtccctacgcacctttttagtatgtatgagcaaaatactgttgaatttcacactcaactaatcctttaataattttctttcagccagaatgaaaaaggctagtattaatttcctaataaaattttttttcaaaagttatcgaggatatgactataaccttggaccagtttcaatttctttttattttttctgagaatacaccaaagattaatgtcaatggcaagtgagaaattgtccctagagaactattcaaggactttttcttactacatttgattggactggagtgaactgacattatagcatctttatcatcacctttaaaattctattttctcttagtagcaacagtgaagactttagaactattacttactttaaattattaaagtatatcacagacaaaatattcaattttacattaaagcaacattaagggtctcaatttcattgaacagaaacaaatgctgaagaaatttacaggtatgatttaattttagagagtgttctttctttagggaacaaaatgaaactagatctctcatttgtctgtatgggcaagatatggtaaacctcatgatcaaaacacatgccagttagaaacttgatcacagaaatgatgctcagtgttgaaacccaacaataaacaaacaaacaaaaacccccactctaaccagaggcatttaagcctctccactgaagttcctgtttcccaccagtttacgacccttaatgttactgcatgtatggttgcatatttgagatgattaaaaataaaagactggcttaaaagcacctcctcctctagtgtgtaattacatacaaactaaagattccttctgacgtcctaggaaccccatttgttaccgtttcatgtgtaagcaccattgaaccaatttttaaagcacatttgcagttatcaaatgtttagtgtgtcctcaagtttcattgatttgtttgcctttaagcaagaaaagagtaaagtgtattattttcccctgcttcttttcatatctgaattgtcaaaaaatgttaattttggaagtgcttttaatcactattttccccaacagactagaatggctccatgaaatttgacaattaagtaaggaaatctttatccccaaaagaagcacgtatcttaccctctaaactgcatgcaaagtaagggtctgtgtgagagtattttccccaaactcctaatggacatggcagacaatgtgtagaaaaatctgagttttgaactgaccaacttcaagtcttttaaaatctttgggcaaaaaaaaatatcatgtagcagttaaaaaaattattgacttacaaattatagaaaagatatgttatctacaatatatgccaggtgacccattaaatttaaaaaatgtgtgcgaatgagtaactacattaaaactaccatcttggatcttggtgctttccaaaattctgaaatcactattaaggagggaccataccagatttttttgttgttcttttccttggagaatggggaagaagttggaaagagaaggaagtaaaccttcactctttggtacagccctgtatagcaaacttcagcctggggcacatttttatggtcaaattaaaaacctttgagaataggagtttatcatagaaatgctgacagatcctaacccagagaagggctaagagcaacacagtaatattaagaaagctctccctcagcacgattgagcttcagcgcaagggatagagttgtctagtggacgcccttggccagtaaacaaccatgatttaatgtgcttgagacttggtcatatgggagctctgtgaccctctaagccaaattttcttttctttttgttttcaactgaaatatgcctcaaagggtaaaggattgcaattttagccttcattcatggatatattgctttctttcaacaatatctgatgggcctgttaactgccacccatggggagcaggttgcaggaaggtctcattgaacacaaaacaccaagtgttttcagtagtttattcacatttttttttctctgcttattttaatatgcaccacgtgtaagttagatgagggctacggtaaaaacatttttgatgactgaaatcttacttttccttctaacgatctggagcaaatcacatattcattgatcatgacgaataaaatgatttctgctacaatgttgagaaaaaatgtgttcattaatatgaacacatgtctacagagatgatttacacgatgcaagtaatgaaagagttcttccttaactagtctactatcaaactgaaaagatgaatcttaaaattcccttgaaaataccatatgattggtcatgtgtcagtaaaagaaagacggtccccatcaccaggccaccaccataagagagctatattaaatacttgggaaaaaatatggaaacaccggtggtgatgattaaattgataattacatagatacactgccataatgatacatatttgttctatgataagtgaaatcaaaaataagatcaatttggttatagaaattccttaaagaacaccaccacttaattatttcaaacttgaactatcccaagaatgtcgagaaaaaaattagaaagcactggctaaaagcaaagcaatctggatacaccaatgtagtcagcatgccttgtgcttgtctgttaaccctctgagtacatctctgacattcaggatcttggtagcttaatgttagaaagattgcattccatctgattactcaagatttctacttgactggtcacattccactgtttattcagcatagatcactcaaattctacagtgatgtgctgggatccccatgctgaatgggccctgcattcttctgagctgcccttctgcagtgtgctgagaaacaccccctagcttcacacggtccagagtccccctagacgtcgatgggaaaaggcctgagccatgcaccgcaggctcagtacactagatgctgtagcaatatagttaatgcccacagaaaaagcagtaattcagagaaagaaaggaaaatgacagtccactgcaggtaggtctctgcccattgcattcttcacacttttagagttgaggccaggctgtagagctactccatagccttggaatagtgctttgctttatatttctagagaaagcagtaatttccaactagttcagtgttcctcattaatatggaatctacctacacaccaacactctttctggtgttctgtgccccctacccccacctcccccccaaaaacaactcaactaatttactgatttatgctactttgtgattttgcgtgttatcacttccggatgctctaaaagggggggaaaaaaacctcaataaacgatatgctttttacatgtcaggacaacacagaccacagagatgaacctaaatgtaaaagagcaaaaaattttggtgatggtgttgcaaaagtaatgacatgtgatttaaaaatccatattaatgtagaccatagtttcagggttgaagagtaaaaatgcagcaagtgaagatcaatgtgcatttgaaaataaaggactatagaaacgttgttcacaaattttaagactctcaggtattaaagtatattcaaaacagagaacataggtactgttcagccaccagatgcaaatttcatgagatatccctctctggttgtctcgtggatcccagagcccagcaaaccttgggaatacatttgagttgggcacctgcctctaagacaccccaggagaatcctctctgagcactgtggtgatgcacagaacctgtgaatccccattctaaaatggaatctgttccagaagaaactcaggcctggagacactgcactagggagatagatttggtaacaagagtgaaaatacaggtctcagacaggacttggcccaaagacagaaaaaacactctgacctcctggacagctaaagacagtggtatttaaaaaaaatcattttaggggatggaggttttatcctcaggggtatcatctaggtctttcatcctgatcttcctaggagactatataggtaacctaaaggtgcacatggaattgtcttgccagtggtttattcactgaaaacttattgttagaacattctggattgtgttcccagtgtgctttctcctcagccatcttgcaaagcaactgcctccagtccccttgtgccccagctctcctatgtgtggatttcatactagatgtagattgcacagtgatgaccacagtgcgtggaaaagcaggtgagaaaaatcacaggatcttattccctctttctgtttgaaattccagccctgcagagcaccgggcaatttattgctcttttccaccagttgtttctttcctgtagatgtctgacactgagtagagagaccctcactcaccaagcacaagacaagctgtggtgactccctgagagtctgcgctggcgctagcagcagctgatatggaagcagcatttctggggcgtcatcagtacatcttcatgtggagacaatttggggggcaccatctatttcctgggtcaagctctttgccacaaacccaattccctccacttgggatgcagaactcactgcaactgacagtcatatctctaatgaaaaaaaaaatctgtttctgaataggattgtgaagaagaaagaaccgtgcgtgtgtcgaagttataaacctgccacgttctaaacccacagaaaaggacaaacaagatatcattctaaatgtccttcttttctggacatttcagcatctaacaacaccccttgatctgcagtaaaatcaagaaacatgtgtgtatacatccaaaggcctgaaaaattcccaaacaagaattctcaataaaattctatgcactcagagggttaacaagtgctatattacatactgcagatcctagcttgactgatgaaaacattcattgcttctaagtttaaaaaaaaattgcaaattggccttaaccctttgaggactctattagcagcaaattaccatcttcacaatcaccacgtgtcatcttattcagtaaagggaaaccgctacaaagatacctgaaaacactttcagttctgccattcaagcattgagcgctagatagatcagatgaaactgttttacacaaatttgggggaaaaaaatctcagagtctcaaagggttaagctaggactttgagtaaaagggtcttattaaaagggcgagttaggggagcgaacagtctcggaggagcttggggagtagtcttccgattccgagttgagttcgggaggagctggctgcgccttgtaccggctcctcacatcctggttgcgtcttcgtcggaaaacctgcctctccttatcaagagcggtggtctagcaggggcataaaatgagaaagaggacaattagggcgagggaaatggcaaaacaaactctttctagaactttctgaggtcagaaaaaatacactggccaagttcacctgtccatcatggcacactttttgttgacagtcaccactctcagggagccctctgctccccacaaatccaggtctttaagggacctggtcatgacatctgcaggcacaggcaggatggatggtgtactgggtttgacccttccccactcctccccagacttttgctagctgcacatttatttacccttggtggctcctaggctagccagaggacactcccaccttctctgaaaaggggtgcctgagtcctgtgtgtaaaaatgctccctgggcaacttcaattaacatgcagctcagggtagctgcataatacagatgaaaggtgatgaagttgtcagtcagacatggaaacggagccacggctcatcctgttcttttagcacctcctcactctaaatgatcttattatctgttgatgagggagtgtggctgaatttctgggaaggattggtttaattttaatgaaaccaatgcctgaaattgaacactgctttgaatgcaattaaaccaagtggaaaccttcccacggatttcactttacaaagttcattttcatcatagtatttggtaatttatgaaactgagattcaattttgtaggtattccaactcccagtctctatgcctcaatttcctgaggagacctccgatgattccccggatgtgttatctgcctgtagctctggatgttatcatgacatcagaatgggggacagcatgacttcatcacagatttaatgggtgtgggggaaaaatggggtcattacagagaaaccttacacagaaagcagaagagtaggtatgaggtctgaagaaaaatatagaacacatataaaagttgaaggcgttcttatttgaaaatcccccttaaaaaggatgtagcctggaggttattctgcttttaagagattacttttcttctacagggatatatgccaccatttttcctcttgaaaatttactgttagctccttcaaagaacagagataaatttacagccagcctggttctgagaacaaagtgaaaactaagcccctcatacaattgcagtatagcattagggcaatcttagatctaaaataggccaatcaaagttccaaaatgaagtaataaagagataaagagaggcagtgtgtagaaccagtacagtaaatggcttcgttaggctgaactgctctacttcagaaactatccacacactgaatgaacagggttacaaaccaatgaggaagataaacttcaataattcacttcttgtctcactagattgttaatacaatgattcagtaactggtctgttgaaacgtctacctttgattcttgttgaatttttaaggatcctcatatagttcttagtcttaaacctattgattttatgatattttcagtatcataaacccaaattcctaactttatttaaaacattgtaaagttacgacacatggtattttgctttcaaagcaaactgaaatgttctgtttgtgtagagttgaatgtttgtaaaaaaaacagacgtctatttagtctgtcttacataaaaagcattttgtagttaatccaaaagtaatataaacacctcttggccataaaaaatctttctatttctacctccttgagaaagaaaaaagtcattggcattggaatgaattctgacttgtgaacagaggcagtcagatgtggggaagaaaagcacatcaggtttgtggtcagggattttgcgtcccactctgtccattgctgaccatccacccaggtttctcatcttttaaataagaagcacctttccactctcacagagttgctgtaggtagaaatggatgtgcaaatgctttctaaacagccaagactcccagaaatgtaaggtgttcttttgtttacaatttgatgtaagacactgttttaaaatcaagtaactgcaggtcatagaaaagcaatgtgcacaaagctcacattagaatttaactcagtactttccctctttccttcagtttcactggcaccttcttgatatttacttcatttccccattatccactcaatacttcacactcttggctgcagccactgaaatacaccattctccacaaatactgtaattcagtttatgcagaagctggtggcacttaatattgagcccatgcttggatggtcccctcacgctcactttcaccttcatttctgcaaatccttgtaagaacaattatattctcttccttacttgtcctgcctagaaagcccttcccctgtccctgttgaagtagtcagttctggccactcctacagatttccctactcagcagctttctaaatgttcacctttgtagataagacctcatgcacaaatgctcctgagctttcaggtgcatggatccccaggatcctcatgacacgtattcttggaaatatatcacggtcatgggcatgtgtcatgagtggttcaaggttgtctctattggatttgcagactcttaaagttgaatgagggtttataaagcatttttgtccaatgttctgtctttacaggcagggaaactgagacctaggcatgtggagagacttgcccatgtgcattgctaactaggaacagaactcagtcttctcctgtgcaaagcccaagcagtttcttcccatttactctgaagtttattgaaatgataaattaaagtcactgcactcccagcagctcaacccttctctgttcccagccagcatgagctagggaaagacattggccacaggtagtatcaaagaccaaaagacagtggcttctccacattgatgatcagagaaacttctctttgtagagcagataggatccaccatgtacacaatcccgtgtacacattctgaattttgatgctcataaattcctaaggagacctgagtctgatgacagaggtgcagttttccacccctcaggtcctcataatattctcaaaccagcattgaggattcccaactgacctgctctcagagatgttccagagggtgtctctgactacaggtctctccttctgggcccccgcccactctgcttagagaaagtattttaggaacttcttccttctctgtttccatgacagtctagtaccattatcgttgttcatcctgcctgcaccataattgatcctaattaactgttttccctaccactttgtagactctttggaggaccaaggtcaagcgttggacatcgtctctgtgttttccacagttcacagcacacagtagatattctacgaactttgtggcatttgaaagatgggaaagtataatggaagtgatctgtttctctctcttcaaaaactttgtggcttttgagatatgagaaagtacaatagaggtgatctgcttctctctggagcacccaccttccggtccattctgcacacagctgtcaggtcaatttctacaaggtccaatttatttacagctcctcataaagcccaattccttgtcccagcctttgcaatgtgcttccaataaaaacttccagggtgtatacctattattactcaaaatgatcctatggcatcagtagactcattgtcttcctttactggacacttgattttcaagcacagcatctgtttactctgcctatggttaactataccttaatttccctttgcatacctcctcactcccacattccatgatcctgatgaagttgaccctactcctatctctgggagtagggttggggtgggcttgtgactcaggagtaagcctgagtttactgcattccccaatacccatgaatggcccaagatgggcacccgaccccatcaataggacatggtaagacttttgctggaacttcacatttataatgaatcccaattttgagagactggcaggcctggagctgcttctcccatcctgggaaccatgtgaagtccaacactaaagccaacacagggaggcagggttggaggatgtcaagaaaccaagcattaactgagtgctggatccatccatcactgaactcagactcaacctgtgaatctttcaggctatgtaaaagaatacatttcctttttcacttaagccagtttggttttggttttcttcacttgccataaaaacagtccaaactgatgtatctctgaatgtactttaatcattctcacatctacctcttggttcaaggtactcgccaacatgaaattacctctctttctctctctgcccactcaaatttatttatttatttatttttattttctcggagtctcactcttgttgcccaggctggagtgcagtggcacaatcttggctcactgcaaccgccacctcccgggttcacaggcacccaccaccacacctggctaatttttgtattttcagtatagacaggggttcaccatgttggcctggctggtctcgaactcctgacctcaggtgatccacctgcctcggcctcccaaagtgctgggattacaggtgtgagccactgcgcccggccaatttatttattcttgaagacttgatcaaattttaccacctgtaccatatattttcttcctaaactccttaggcaagaattgttttgaccaaacttttgggaattaattgcacactgaccttctattatttttctttgcatattccccaaataccttgccaactactctatggtagaatttgaaacttctttgcattttccagatgattagtagactgtggcacacatattaagtgtgtattaaacatttcttagtgaatacggcattattttaggggactatatactttctgaataataacaatagcaaaaaatagaattcaaagcaactccaacacaaaaaagaagtaaaaagtattaagagtcaatatttaagactataacttatgcttcaaatatgaccaaattcttatgtcagataaagttaaaattctcttatgaattcactcatcctacaagcatttattgtggtctaatttcttatcatactaaacactgtcatgtatgatgtttagaagtttgtggctacaaaattaacttgactctaaaatatatgcagttcatcttttccaattgaattctgtagcccatatatgcagtttgggacagatgaagttaccaaggaaatagcactgtaggctaatatataatttttacaaggtatactcataaaacatgtaatccaattgaaaatttcttccccgcccctgaaaaaaaaaaaagcatttgaaacataatttgttcctctgaaatcctgcatcacaacttcagagtgtgagccctttcaaccatttctaaaaggcagctttactatttttttaggcaggggagtcctcaagagtcaacttgattttgtgtgtgtgtgtatggctagctttactctttatcaatcacaaaaaaatccccagacatcaagcaaatagggtctcttcagaacgcctatttttgtaaattaagtatgtcctcaggtataggcttgaggctccatgaacacttaagagttcctaacagatttattattttattagttattttgttcacagtttgtagctttgttggaacctacatgaataggcttgcagtagaattcccaagtgtttccttagtaagttaccacttcactaagagatcctaagagactctgaagagtgcattatcacattttggtgctaattatcacaggttagaggtaagcaagaaatctcttgagattctggagttgaccagtggtaaccaaggatgcagctctaacctagttacttcagatatgtgcacaatagtgactgccatgctgggtactgggtgagagctgagtaatgatggcttgggggaagctggtaaagagagaacacatggttgattaaataaaatggtatagagaaatggactaatataaacctgccctatccagaagaaacaccgcatattcctaccacaatctgtaagccctggcttatcacaaagcccttagcagatgctagatcaagtgtgaaagcagaggaacggtaaaataatgccagctatctcagcaactcaggtggctgcacatgtggtagctgaaaatcttagggaaatccatccccatcgtgttggtgcctgccgtaacaccaggcatacataaataaaagacagtgcttgcctattatcagatttattcccataaaggatacatctactgaatttggcctgtggcctcttctgttacaatgaaatgacagtatcctccacatgtgctcagatagtttaaatccttcgttctgacattaaattgggaaaatcagtataaagacatatgaactacccatctggtatgtctaacgttaaaggaaaaacatagcatagaggaggaaggtcaggaataatcaagaacatgaattgaagcattagcttaggttttgccggtctgagtcaccccacgtctctatgcttgtcttgtctggtagcttaagtttaatccccttggaagcagcagtaggtggaagtcaggagaattagctttttgtcctagttcagctaattatgtgaccttggacatgttttctaaccacatcgagccccaatttccaggtccatagactgaaagggggttattgtgcataatccctagggaaactttcacctatgaaattctatgaatattcttaatatcaccatcaatctacttaatgggttatgtttttctcttagcaaacaataggccttacagtctatggaccaaacatgtttctgttccgcaatgcttgcaggattcacaagagatgtactcactttcattgtgaggcaatggtttctgtcatggcagtaattattggatttaagtaactgcatttttcagaggcaaacattgactgcttttccttttttgcttttcttaatttattgctagccatcacatatagtcttcatttcattaataaaagaacattattgtgcattttgccttttagcccatccattattcatgctacctaggagactgaactggggatgcagctgctgggacattaatctcaggaaccctttcttttgcttacccttactctgtggggactacattacgatttgcttgtcagtttggaaatgttttgcttgctagtaaaattaaactgacaaatcgattgaaatatccaccctcctcattttattgggcttactctcaggcttattgcagttctgttttgttttgctttcatatccttttgaggtcttgccagaaatgacacagtatctgaagacagggcatggcttttcttaaagatgaccatcaaaatggcaaaaggaggccttcttgggatgcaactgagtagccttccaagctgcttactttcttggcaagactatcttaaatattattccccattttcctgggagagctgaccttatgcttctgcactactaatcttaaacataggcttctcctgctgacctggttcttaatagagtcttaaattggcctagctctgcagtgggtttctgatggcctcccatcagacagttaaaattacagccaattggtggcggttgagctcaggacaaaatttgtgtgcttcctctgcccgacagcccctgattttcttataggagcccaacctcagcggaattgccatgtttgttctccatcatatcagtaaactaaacatgaaccaaaagcacagtctgccttaagaaaatctatgaaaatttagtgcctacaaagcaagtaagtcagggatagttcctttaattgcagaaaccattttaaccttgccaaaaagcttagtcctggattgctaaaagtgggatgttattttagagcatctcatatgtgatttgattgcccaaactttgatgtatcccaaattcttcaaaaacatgtctatcctgaaaaaatcagtgaaaaaatggtcccttcttcggagagttcaatcatttatttgttaacttaacaaatatttattgaaggcctcttctactaggcagtggagacatagtttttaacaagccctaatcctgttcttgtggaatttgcatttgtacagatggtgccttttaatttagacatattttccccctagaaagggtgttggaaaactcttctggagagggccagatagttaatactttaagttgtgcaagccacatgtttctctgactcaactactcaactctgctgctgtagggcaaaggcagccatagacagtttgtaaatgaatgtgtgtgactgtgttccaataaaactttatttacaaaaaaaggaagtgggctagatttggcccattggccatagtttgccaagccctgtcctagaggatcacattttaaacttatacttcatcagaatttttggctatagctacttcaggtaaaacataatgccgcaaatgctcacaagaaatataaacatatacattactgagcggtttactctaatcagagcattaaaacagtttatgattctactttagtaacaaatgcctctctctggagagacatcagttttctcaggaaaatctgtggagtgggtgatttgctcttggaagtgagggaaacagaaagcaaatttttttttttttagtttcttctttgggctggggtgtgtgaaagcacttttgcacaagcagctaatttaattctcaccacaaatttggaaggtggataacactcttcaccttttcgtaggtgtggaaaatcagacagagaatgtaactcgcccaaggttactgcaggaaatggggcggactagatccaaacccagggcttcttgactccaaagccacactctctctgtacactgggctgccaatctttaattaagttaattgaatctcaatctccatgacttttttttgagacggagattcgctcttgctgcccaggctggagtgcagtggtgtgatctcggctcattgcatttccgcctcccgggcccaaatgattctcctgcctcagcctcctgagttgctgggattacaggtgcccaccaccatgcccagctaattttttgtatttttagtagagacggggtttcaccatgttggccaggctagtcttgaactcctgaccttaggtgatccacccaactcggcctcccaaagtgttgggattacaggtgtgagccaccgcgcccagcctccaagactgtttaatttctaaaagtgtcatgtgtctgacatatatttgagaattgtttatttcagcctatgaatacttacaccctttcttagcaaaaggtgtgttgatacttataattacgttctttatgtatgatttcctgtgcatttatacctcataaagcctctatcctctcaatgaacctcactaaggagcattcacaaagtatggcaggaatgaatatgtagaaaagagcatagatgtttacttttaagtcaaaatgagggaaagagattctgaggcaagggcagaataaatatgatactacacaattttcagtcaatctagaatcatcaggaatcttaggaaaatgttaaaatctctcttcagtttacactcaatgattaagacttggaatgccatgacattttctcatttttagtaataagtaagctaaattttaaaaagacttatatgtcattggaatcctctcttaaggggcctctgaaaacaaaataaaagaaaataaaacctcagtgagcaacctgtttgagttgggaaatgtaatgcagatgtttcaccattcccatgttctttccaatgacccttggtgaccttcacgccacaacaggcatagtatcactcatcttttgagcctatggcctaatagctcatgcttgggtacaaggtacaactgcaagaccaatcctaactactttcctgagacttctctctaatcacagtttgagtggttttgaagtttaaatctatgacttttcgatgtgttaaactgaatcccccaaattctgtgttacagagggagcctctggagtgggtggagcatctgccctggctgccaaccatgctctggctgtccccggggacagcgttctcactctgcagagcaaagccaggacaactagccaccgagcaacctgcaatgcattgcaacttgctgtgtacatttggctgcttctggccgaggcgggccctacatcccttctcacaccacacggaggttcctccctggcttccaggggaacagttttctcaaacctgcacggagcaagatgcgtttaactgaccccattccttttaacaaccgagcatgacagcgcggccatcaccgctctgcctcattactcactgtttcaggacggtgcttgaatccaatatgcacattttagtcacatcttgcctgagaactcaaccacccttttgtcctagctcacctccccattttatcttatttctcatgtttagcttatgtcttgttttgatatttgttttatttaatcgggttacccagttctagctgttgccctgttctgtgtgctgaaggtgcaggattcttctccatgtgttacagggcatagcacttgccatggtgacagcttcacttgggaaggtagaaatgtgtgtgacagcgtcccctttgaataaggatgcatttccaggaaggggaaaatataacgggatgcaaatgttctccagtggcttgcagcagggggaaatggtggcttcttaggtcaggagagtgtgcaatagcccagtgagctcacacctggggcagcgtcctccctggactctgggtgacaggagcaaagtctcctggatgcgtgggtcaagtgaaggatgctgctcccttggaagcagctctctggtatgaggctggagaatggagagaaaggggaaaacaaatccccactatttgtctacaatcaccaaaaagccagttaagagagacagaccaattctgggcaccctgaggagatggttttcccagcctgtgccctcatgtgatctgctttacaaaaagcaagcgcgactcccaagtgttcggcttacagcagtaaaaacagccatgagcgctttaaacacaacaattgggagcagggatgctcgcctgtaatgattgtttgtgttagaaagttggctgccaccatggttagacaaatgctcccacttctgcggagataaaaggcaagcactcgcaatcagtaaggagagcgtgtacgttctggggctaaatggcattataaaacttcctaattaagcatatatgccgatgagtttttagcatcatttctccaatttagctttacatactgggtgcactgttcagtacagcactaactataaacattgttgttactgccccagctggaaaacagagcactttatgtgcgcaagaaaaaagagattatctcccatctgctcctgcccattattcagggatgtgtcattttgtctgctgatgggaaccatcactaggattttagttaaatggcctttttatagttggctacgtttattaattattgtgtttacttggggtttagttcccatccttaatcctacaaatttagtaatttaattttccagaggtttttgaaattagatgactttatatgtgtaatttttataacacaaatatgcacaactataattagatatacttgatgcctatttttaattgtatattaactttacacatatatatctggttaatattcctgacattaggagacatataatttaaaaaggatggagcatggtgtgattcgatttctatagagtacaaaaccagccaaagctaattaatgtggctggactctagggtcagtgtttaccctcgaggtgaagtgacccctcctggaagggagcccctggggtgctaggaatgttctgtgcctgatctgggtgctgcctacaggggcatgttcagtttgtgaaaatttatagagatgtgcattcctgataggtgcactcttctggaagtatatattctttcaggtaaaagtaaaagatggatgaatcctcttctgtgttacaaagtcaaaaaagaagggtctgcacaaaggcagattatgattaactcacccttctccctccaaaataaggtcaaaaattaagttctttctacatccataaggccaattatgtaggtaaattaaataaatgaatgtgcaactcctacatgcattataaatggagaagacacaaatagccttctatgtcaaaatgaccttagaaaattttattgagctttgggtgttttcttgctttaaacagatttggaaatgatcatgattttagtatatctgaatcatttgtcaaggtatgcccctttctgctttcctatgtactatgttttgagtgtctgattatagaaaaataaccaggagtaacaattggggctaaaatcatatatatatattatatatatatatacacacacatacacattatgtataacatatatactttatatgtgcatatatacacacatacatatatattttaattttttggtaaaactttgcagtctaaccatgaaacaacatcaggcagctactgtcttactacagataggctccacagtttggaaaaaacaaatgccaaaaccagtggaattttttttttttcaaatactaagatgtggagtgttacctggagatcacttcagaaacattaagatggcgaaaacagcctccctagaatttctcagagttcatttctcaaaccatcaaaaaccatcctgcttgtggataacttaaagagacacaaacaatgccccttgaaggaaatgccagggcagttgactggaatagaaaacgattggatagaattcttaacccagttttaaaaaaatcgatacctcccataatcccttttgcttgagcagataagccagctaaataatctgacagttacaagatattgaaaaataaattcatgcaatagctaatacatagagggatttccagggggaagagggaacaataaaacaaaaacaaaacaaaaaggtggagaatttgaaaacacaagcttaccaacacacacaatgcattctatagcccattgtactttgaggcgcttctactactaaggtgtaaatgcattgttatccatctaatcaggtcaaggttgggcttgatgactttaaaatgacagtatatacttctatagaacacacactagcgtgctattgttcttccatttgttaagggacagaagagcactggaaatcattgttttaattagcaacgtcaggaaaatgctttggcattagcactaaatatactgtccttttaaccataaggaaaattgatactgagcatgtgcaatggaaagaaagctggcaaatgtcagtgtgaataatgggtgaaaaaaaggaatgagggggtgtggcatctcaatcaagattaaaatgaaactgataaagcagcatatggactggataacaaatcaaaagcatgtttatccaccgaaggaactggttaatggagactgccagcacgttgccatggaaacactgactgttgagctgcaccatctcataccttatccaatacattcctggttgctggtagtagtccaaagaccctgatctcttgatggtaaacccgtggtccagctgagcagagagaaatggggcaactcagtggatcagcattgtgctaaagaattaagactccagaccaagctgttcttcattgattctatatgtatatatagttacgatgcctcttctgcagggtaactagctaatatcctaagtctgcatactgacaacaaaaaggcaggaagtgacacctcatgactattttggaggccaatttgctcaaatagatctagttcttcaaacaagtttttgaatgaccattttaatcatgtcctctcaatttcaaaagatataaacacctcttcatatgccatagaatagaaaatgcttcacaattcaataaagtactgaaatgagcattagccacttaagagaaagcagattggaccccatagagtattaccgcataaggcttaaatttgagggcttcataactatgaaatgaaagaggaaaagaatcaggttttgaaacctcatcaattacagcatttaaatttctgagttaatcttcaaaagcagagctactcttaaaggtgaatcttttcttttcttttcctttttataaaaggtatatgatctaattaaaggtgaatcttaattacatttctaaactaagaagatagagtataaaacagtcaataaattttctctatgaaaatatggaaagtgaaataaaacaaaaaatagttttctttgtataataaaaatgcatatgaacagttaagtgcttttgattaacacaaagtacaataaatagaagacaggagaagttctcaaagttgttcatcctggaataagatgttagcttttgggtacctggggataaaagattcaatcccccaaacctgaaggacactaatcatgctgtgtacccgcttccccattctgcccacgagaggatgcgacttggacacctttcttcagaggggctcatgtgttctttcaagtgcgttactggtatgatgctgatgacagtttctgcttctaaattcacaaaggcatttcaaaaacatgccagggcaccaggcatttaaactaaaaactgcttggaggattttgtgctctgattataaactaggctatccaagtgtgcataaaatgcaatgtgaagttttaatctttttaaaaatgtgtgtttcattttattgagaaaaaaatcaaagtatactggctctcaggaagatgaaggtgtatgcttggccacaaagacagctacttagtaattagctttctattgccatctacaggcaaagtgtcatataacaggtctcattttagaactaagcttcccagtgtcacaattatatgcatgctgattagtatggatttgttcaattagactgaaacgctctatttgcatgagcaaaatgcaaaagaagaactttaaagcattaggaaaattattggttaaaataataaacagtgttaaatgaggaaaaataaattggaactgacatcttagtcatcggttcttcatcaagctgagcaaatctaataatgcctctctctcttccctcagctctcaaaaagttcaccgttaaaatgtcatctctaattcatttcatgtctataaattgcattttaataaccttttgtttccctttctctctctcttttttttttcaaatcccccaactactgagaaaggcagcagagggacaatggcgtctctctgagaggcacagaatgctgcaattctaaggaatgcaatgccttccacctaatcccatggcttgacctaatgtcagagcacctttcctccttcaggagggtgtgtgatccctgtgaacctccagctggtaattactgtcctagccaactcgaggccctcttgcgaccttaatataaagttgtcatttgtcctttctttggtcctaataatgtacagactgtgaagcagaagaaaaaaatgacaacatgaacaaaaaacactacaattcagaacatgagtacatgttaaactactctcatatcataaattacacctgtgagagaggctgccggttatgacagtatgcttttttcttttgtcattctaagaaagaaagagtgtcacagattctctgatgagcattggtgatctccagcaggtagttaggtttctaactaaggaatgagaagtactagttaaaaattaattatttaattgttgattccccaactgccaccaaaccacaaactaacactatgtcctaaataataatttttaaaacattctaaagggtgtatgtaattctaaaaaattagtcccatggtaaaggcggtttaaaatacattattttatagcctctggggagagcgtatatacctaggaaaattctgtttgaatgaaatttatgctgaaaccagtttttgtaaatctatcaaagagaagtcatcactgtattatatcaattcctgaacttttaatgatgtgagcaaattaatcattatattaaattattaaattatcaaatagtctttatagaatataccatttataaaaaatttttcttctacctcccacttattttgcttcatagcagaataatctttcttggcagtcatactttggaatattatttaatgccagggtttctttttcttgtgatagtcccctgatagtcagcctttgcattttaagaatgaaaaaatggttatgcaatataattggatgtatccagtgctattctgaaagtatcacaatgaaggtggccaaaatagccagtttctaattcccagccccaccctttggttactgacctcagccaggttcttctagaaggtagagatatttatgagggaaaagcattctggagaaggtgcctcatgtacatagtatggtagaccagtttctcttaaaacaatctctgaaatctacattgatattctcttttatgcttgaaatattaatgctgatagttaacatatgaattgtgctatagatctgacaggcattttttaagatacagttttctgaaaccagccaattattttgaatctgaattaagttgataattattaaaaaaaaaaaaacctctgcagcagtaaagattaaacaagcatgcaaccaatgcataactcagcattacacagcccactttacaatttgtaagtatattaccagtttgtgcagtttccatggaaaccgtgttagtgatgaattgagaaacttgcattcaaaattgcattcaaagtggtccaatcatgacatttaggaaaaaaaaaagtggatctttgatcttcaaatactaatgagtgttttaagatccagctagatgaggttttaatgaattcatatggataacgcttcagaatttatccaactttgattaaaataggatttcccctcaaatatgtggtgtttgtcaattggaaaattgccctgacgttcctgcccttagtcattgtaagactcctagaatactgtgaacaaacaaatattgagcaaccaaggcaaacttaaccaaagactgattaaaataaaagaccaggaaaaaaaaagaaaacaaaagcaaaatgacagaggtggaaaggcactctctctagcagctgtaagcccttagcaggagaaaaacagtccctttcatggacaagcatgctggcagtccattccaaaagaaaactgtggaatcaaatgtttggaatagacatatatcttgaacgaacaatggaaacagagtatagaatgtctggtttagtagagaatcactatgatattgttgctttcaaaacttactgactgaatatcagctcagaacaaagaacactgaccatctatggaagatgtaaaggttaatttacttctacattgaattttctcagaaagaattaaagatagagggcaagaacaacttgaaattttaaaacttcagcggcactgaggaacatctggaagagtaggcattccctttcactttacacatgtgccagttgctcacacgcatgtaaatcactattgaaagggttcaatcgagaaacacgaaatgcaaacagtacgagggtgtgtatgcatgcattcgtaccatttgcaaattctggaacctcatatcaaatactcagtaacccagatctgggattggtggcatcaaacagatcacttgtttatcttcagtttttttttagagctctcgcgcaaccaaaaaagaaaaaaaggaaagaaactaaaaacacccagagaagtggttaaatattcagtactgctcatgagtgagaggtgctgtttaatagcataaatacttttgaaaaagtccacatcatagtgtcttaaattctttgtttggagaagaaaaacagctcaagtgattttcagattgaatatgctattaaaatttacacactctgaaaaaaagaggaatttattaaaaactcaagtaattggaacttgaatatatttactccagaatatgacaccaggaagtatgaggtttcattattcctcggcccaatttaatctttgcctagagctgcgatcaaattgcatgtagtgtatgtctgcatgtatagaacagaaaagaaaggccttgtgcagacgcatcaataaaatagtaaatgttaaaagactttcaactttaagaacagaaatttctaaggagcaagacatcgtgacttcgttgggtgttcacagtaattcaatttcactgaaaatctcactgcgtagctttctgctatgctttgactttaatttaggtctagtatcaagatctatagtgttccaagctctccctgcaatgtcgtctctctcagcttgcctttcctttctaggtcctagcaaaaggacactatgaactctttttcttagagccaagaagtttgcattggcacagagtccagcatgggggaggttttcggttttaaataaataaatcataaaattaatatatactgcaagacaccctggaggtgttggataatgatgtgatgcccagggaaatgatctgcagaaacacataatatatataagtcccatacctcctctagtgcattaagtggctgagctgtctaaagaaatgacccattctgctgtctctgactggagaatctcctgagtaatgcctgtctcttaggtgggttgctttaaaaaaagttataggtggatatttcagatgcttactgctatgacagaaactccagctgctgtgctattcggcttggggcctgtgttgaaatgcttctttatctttccagctactgacagctgatgttcattttctgggaggccatcatcctggagaaaaagaaataaagagaagagaaaaagaaagaaaatgagataaatgaaaaatgaaggctaaatcttctagtcacaggcagtgatcttagaattcataagatgtcagaaataaaccaaccaatgtctactcattaaacactattgttggaagtactgctccaaggtctcattcatttccacatctgctctaaaattaatttgctttgtgtcatctgaccctcagagatttgtctctaaattaaaaaaaaaaatttctgtttttggtttctaataaaatctattccaaccacggctctaggaacatgtcaaaaagcaagttaatctagatgaccagaaaaaaaattcaatgtgaacatcttctttttaatttttttttcctcttaacccatcatttagacccaaagccaagggtcttggatggcaagcttgggcttctgcatggcccataaataaactcaggctgttccacagttactcatttggccattctaaaattccaggcagccttccaggcagaaagatcttccttaaattttaagtctttcttgctgccttcaaatcatctgttattatgacatagtttatattggagcttattttaaccaaggtctctattctctgctggagccatctatgactgaggctggacacatggttctcttgtactaaatactgttagaatcacaataaccagggtcataagtatgtgccaccacttactagagttcatgatgaaaaggctgcaggatccttcaaggcagagactgtgttttgctcactatagaatctccaggtcttagcatagtgccttggcacatattagatgctcaattgtggaataaatgaatgaacagataatagagtgtttgtaactcactgctaaaaagaaactcctggcaatcacttcgatgccattcattatttttcttttcttcttcctctccatcattttgcaggtaatttcttggttccacccaggaaaataagtctgctgtttctcaagcataatgtgctggctccttttgcacgagctggtccctccacatggcatttgctttttctttcagcatttgggcattcacttattcaatggacattaactgcatgcctacatggaccaggtactacagtacgtgggggagaaacgatggcgagcaaagacaggcatgggccctgctctcctagaccctctgctccatttcttttcttcgtaacttgggtctaacgggcctgttccaaggcatttatccccaagttaagcacagtccattctaatggctttactggaaacccccagtgctttttcattatatcaatttgcactatttctatttttttggtgttagaaacaaagtgaaattccagtagagtggggatgctacttggggagggaacagaagcagggccacatgaagtgccgaccttgtcaagggctatgttaggaatagcagagtgtgggaggaagatgtgatctctgtccaccagaaccttgcaggctaattgggagacaaaacatgcacacactatgtaaaatcatgaaacaggccaacaagattaaaaggagctgttacaaggctgcatggctggatggctcagctagattcaccaaagaagttcagaggagaaagggcatattttctggtgtgaacagttacagctgacgtcatgagggatatgggacttgacctggcccttaatgatggagagtgtgttgacaggcagagaggaggtgtggtgatatttggtgtgcggtgtgtgcaagtgggaagccacaaagtcatctctgccaaacaagaagtcaaacagtttgtctctagttaagagtttatgtgccatggtaatggcagagaaagctgaaaaaacagaagactggccataaatgaatacccaaaagatcccagaattgaagccttcatctccattaggaatagagctttttaataagaggactgtaagtttaagaaatgtgaaggactaccttccctttactgtggtatttttatagtacattatccagctcttggttcactctacaagtgaaagagaaatcagatgataattacaaagaattaggattatgcgtccagagttctaaacacaagggtgaattgaatggtgtatataaaaaatgtttttattaatatggtgaatgaggccaaatgcggtggctcacatctgtaatctcagcactttgggaggccgaggcaggtggatcacctgaggtcgggagtacgagaccagcctgaccaacatggagaaaccctgactctactaaaaatacaaaattagctgggcatggtggcgcatgcctgtagtcccagctccagctactcaggaggctgagacgggagaatagcttgagcccggaggcggaatttgcagtgagctgagactgcgccattgcactccagcctgggcaacaaaagcaaaactccatctcaaaaaaaaaaaaaaaaaaaccaacaacaaaaaaccaacaacaactggtgaatgaaacaaaaggcccctggaatttaagttggacaatagcgtttgggaactaagttagaatttttgacagtttttccacatttgacaagggataaaatgatactgaaagtcttctgaatattagtatcatgtcttggcagagtgtcgggttctgccagaatgaaaggggccaccttgggtgctctactggcctcaccaacaagattacacaagtacttcttaccatctctttgtagagttccaggctacctcgggcaaaatgatcaaatgagctttcaatgatgagatactttgaaaaacatgattgtggagaaggttgaggaaaggtttttctttttaggatgaaagaaacttgagcataattgtggtcttaggataagaagctagtgaaaagggagagttgaaagatacgagaaagggcagggtagggacggagggtagaagtgaagtggtttgccttggggaggtataggtttacctctttctctgaggcaaagatgaaacaaagagggaacgagcagaggtgcgggggagggaagttagaagagcacggcagggcgaggaaggtgacacaagtgttaactgctgtttacatgtatgatctctttcctcctcaaacttcagtccatttattagtcccattttgaacatgggcaaaatgaggctcagcaaggtgaattcatttgctccacgtcacatagctagaaagtggttgagtcagcattgaaccaggcctgaaactctgttctttttcccacaccaggttgcatcaattgaggatgctcactagcatggcatcagctacaaaagggctgcttaactgataaatggaaatactcagtgaatcatcttttccatgatgaaagtggcacagtggtgaggcggaaggagaattgaattaggggctgaacaaaccagagaatatttggacacgacttaatggagcctgggaatcatctggtggtcaataaaagagacgctgagcatttcagggacccagtggaacacagttagaaattctctgtcaagtggagactgggtgtccactaatctgggatgtgtcaacgtgacctattagggccgggactctaggatcctatgtgcagcaagcagtgcagcaaggcctggctgacactgggcagcatagagttgcacggagccaacagggttgccgtatgatcggcacaggctgtgtttaccagcctaggtgtaaatatggggaaagatagctgggttttcgtaagagcagcccctaattaacttactgagaaagattcagctcttgctgaataaccccaccttcttttcactccccaccattggcatcttttcagaaacttgccttcacctggctttccctccactgccagttcttgagctaggagtttgctctccagccacctcacaatggatttccttatcatttcccagccctgtcctggtcctaatctcctgtcaaggttcctagcaactctttcagatactggggcctggaggtgaaggcctccagctttaaattccagtgaaggtttgagcttcccttgggttattagttcacattgaagcaatgcaagtagcgaaacaagttgtcagagaggcttttgacttcataaatcttaaaacgttctaggatttttttccaatgaaataaggtgtctcagctggagtaggtaaaacacatacatgtaaacacacacacacacacaccccatgacaatgaaaaagtctgcagtgtttttatataaattttgaaggttttcagcataattggataaaaagacttaaacaattggctttgcagggctctaatctgtacctgcgccatacagatggatgatagagatttagctaacttactgtcatgcatcaataaaataaatagggacgttaaaaacataaatttatatatatacatctttatcaccattattcagaatagattatgtgccaaaaatgtgctacgaattttctaaacgtgacaaatctggcagtattttacaaatagttacggtattattaccatacgttctggtttggtggtagtttctgaagttcgacacaggctggttgtggtttgaggttagtagtttttgatttagaaattcccatccaccacttggcagagcattgcaactgacacgaacaaaattagtttgcaaaatggaaaatgaactctcaccactgtccataggagacctggcctcctggtctccatttctctaggggttactggggaagagctgtggggaggcttgtgggggaacggatgtgaagtcactctgtagtgtagaattcctcgctttcctctgggaaaccatttcaggcgtcatgctttaaaaaattctcatccccttgcggatttttggttttgaatcatggatctggtttgcagtctattcattgccagactccattattaatatctgtaaactcaggagaagcatggcagtcttgagcagtttactgctaaaatattcccacgtagtttaaaaccattccaaggttattaaaggactcttcaatagcagttccgctgcacctcccagtgtgcttgactcctgttaaccatccccacctgcacggcacccccagtccccttgactctcttcagcatggccctatgattctctgtctacaattcacactgcactttgggagaaaatgtaaggcaagttgagatttatcttagagcaaggacaggataaaatgcccatatggaaactgcaattccatgtcatcgtttaaaatttgtgaatatcaataagtggttttatatattattgcagtgtcattgggcttcacttaattgctaacaaattctaccagcacaataagatgaatgtttacatttttgtgtgtgtgggtagggctgagttttattagtcaacatggaatatcttgggagattatccaggcttctattttttcttctttcccttgttctttttttctttttggatatctggacttagcagaatcttttcaaaagagtatgtaggtgggatataggaggtaaactaaagtgtaaaggccaggaaggtgatagaaagtcttgaattggctaaataactgtatttgatttatttaaaccagtctgttctgctagtaccaaagttcttgaacttcatttcatgttataatcatctgtgagcttttaaaagtcctgatgccaggaagccagtgcaaaccaattaaatcagaatgtctgggggcaaaacccaggcatcagacctgtattagaggctccagtgggcttcaggcttgagcctcagttgttttttttttgttttcttgagacagagttttgctcttgttgcccaggttagagtgcaatggcacgatcttggctcaccgcaacctctgcctcccgggttcaagcgattctcctgcctcagcctcccaagtagctgggattacaggcatgtgccaccatgcgtggctaattttatatttctagtggagacaaggtttctccatgttggccaggctggtcttgaactcccgacctcaggttatctgcccgcctcggcctcccaaagtgctgggattacaggcatgaaccactgcacctggccctcagtttttttttaatctattaaattggcaaaataatttgatgtaaaacatagattcataaaattatagcatcctagagtatcagaagaataactcgggataaggtagatgagcattttgaaaataaaaatggaatgacagcaatatatttaaaatatcacaatgatgataatttgatcctaattatatataagaatttttttctggaaatgtcaattctgtttatgaacttatcatgaacctacattttctatcaataaaccgtcatttgtggggaaagtgactcaaccccctttctaattcctggaaaggtcaagatatattattgcctattttattcttatattataataaatgtgcctaaatcatattgttctccactagatgggtaatagggtaaggaaacatagttgggataattttgttggtattttgtaactacattaaacaaagtagctgtgatgctggagaaagtaacagagctggtgatacacatattatctatctggatctgtgacacacaaacaggatcatgttgggggatgacagtctttcttccttaatcaagcttctcattcaccaacattaatcacaatttgcatttcatgagcacatagcaatggatgaaacagttgtcatctggctcagactcaaattcaccaaatatttgctaagtacctacaaggtgctaggacttaagattgccctctcagactcttcaactatatgatccttttcccatccttatagcaagtggagaggagaatcctattttctccatttcacagataggaaaacaggtttaaaggagagaaaagacttgcccaaggtcacacaggtgagtaagctgatgctcctcccatgggtctacattcctcttccagacgtggctgcttactgacgatggctttgttcatgtggctcattggaaccatccatagagaggcctcgctcatgactctttcaacaacagagcaaagggcaagaatacggcagagcatggtgggatttggacccaggacgtgtgaaaaataaaggtgaacttagaggaagctcctggatgaggttaaaacaagtgacttttgcggagtaggttttcctttctgctgccctatgctttactgtctattttatataagtctacctttcctttttctttctttctttttgtttgtttgttttttgagacagagtctccctccatcacccaggctggagtgcagtggctcaaacttggctcacagcaacctctgcccccaggttcgagccatcctcattcctcagcctccccagtagctgggattacaggcacccaccaccatgctgggctaatttttttttttttttttttaagtagaggtgtggcttcactacgttggccaggctggtcttgaactcctggcctcaaatgatccacctgccacggcctcccagagtgctggggttacaggcatgaaccactgcacccggccaagactgccttttcaattccaagtatgccaagtaaaaaagtcatggtataagcaatagagaaaattagaactaatgagagcagagaaagtgctttttgacaacgtccttacggttcacataattattagtacttttcttcccccttctctcctttgtggtaatcagatataatttgattgccaaatgcaaaatgtcttactaaatggatattctttgaaatccctaatttatttatttcatttgcttggccattcatttgttgtacttggagacatcaacaaatgctaaatgctgattgtgaaagcttacttttaacaattgattattttcagatgaagaaaaaatccgttttctgatttagttacttcataaagataatttcaaaagttaagcactcacttaatcgagtctttaaaaagcttttattaaaaccattttttttttctaggatggtaagtctgtttgaattacagaaagggtattttttttttagttttcgatctcctagatgattacttaaattctctccctgcttttagaaaatgcctgtaggaaatcagagaggaaaaactgaaatggacagcagaagtctaaggtccagagggagcaatggaacataattatcagcaaagtgggaccatgtgtaaaactgtgcacaaaaccaggtagaagaggcagaaagttactgctgagacacgtatatattgccataatgagcaacctgttttttcactggtaacagccagaagccttcttaattttgtttctttaccacagttgagttgggatattattaatatagggccatttggtctggaatcaggggaagattcatgtcgttcccaacagcattccagacccctcatgtatataaacaaatttgctcacatttacaaagttatcttctagcaaacatgcacattctgctggaactgactgtcagatatcttcttcccagtcttctccaggattgagctctggcacctccttctctgggctctgggaagtctccccacagagcagactggggaagctgttctcactaccctggaactgtctggttgtatcagactttgttcctagaaggcagggctggcacacagtgtctctctgataaaaatgtatttagaaatctctacatataatttttcaaaaaaattgctcagttgtggtggtgcacacctggggtcccagctacttgggaggctgaggcgggaggattgcctgagcccaggaggtcgaggctgcagtgagccatgattgagccactgcattccagcctgggtgacagagtgagaccctgtctcaaaaaaaaaaaaaaaaagtaaaatgattatttgtcacctatgaatatctttcctctatggctcttcaggagccttttaaggccacatgtcaaattcagattgtctagtttcttctgtgtggtcaccctgtctcagtttctccagagctaatatgcaatttgacaatttatggatggtaagcttttattttttttctttgaaatttaaagaaaaaatttattgaagatctgaaaaacaattcctaaaagatcaacttttccagaaaactagctacacaacgcattacgtctatcatgttaaaacatgcattagacacaaatacaaaaaccatgaaaaaagccaccattcttcaacaatttgagcaaagataaaatgcctaaataacaacaaggatgacttgcaaaggatgagctctttaagcatcattaaaaaaaagtagcacaaatggatgagtgtgttcagttatatacactgaattgaacctttggcactaggaatcagagcattttgtcatacagcattaacatgtggatcagtcagaaccaaccactgccacccagagagcctgcagctggcttgtgcctcttcctccccgcacagctaagaaaaaggtaccatgacctgggtaagtgagtttggaaaggttgctgacttgtattagcaatcattacagtgatgacaatgtccatattgtacctgcctgtttacaacattaccatgttttcatgtgtaacaaagggtggggtagatgtaatgtgatgcatgggactttaaaacacctggggtgaaagtgaggatatctggctgcaaattctggctcaactgcaagcttggctactttgagaaaatcaccctgcatagccttagtctcctcatctgtaaaatgggtacaataatacccatcctgcttatcttgtaggcttgttatgaggctcaagtaagatgcttcctaatcttttcagcttcatagaaaaggataacttttgcttagcaccctggggtgaatgcagatgttgttgaggctggaagtgaccactcctggatactggctgtacagccccctgtccctagggccatggggattactatttttgcatgtctgtacaccagttagaaaactctgctatatgagaagccttaaaacaaacctcagtgcatagctctacatgctcattttcaagtctattctcctgttatttgtatataacctcccagtggagtgtgaagaatcacattcagacatgtagaatgctggaatctagacctatggccatctagtggcacaacatgaatgagatcccaagttcttgtccccccatatgtagtcacctgacacattgactgtgctttcaatcatgccttgacctcaagcttttgttgttttggaaaacaaaacaaaacaaatcactcgactactcaccaaggtggcaattcagagaaatggaacattttgtggccttcaatgtacagccagatgattcagtgcagtagggaggctggtaaaatttatatcaatgagctgacaattttatgattctccacctctatgaccacgtccatatatatattcaagcctatatctgtcttctattctggcagtaggaactattagacttagtgatggagcttccccatctgtcagtggggattaccatagaaactagattacaaagttacaatgttgttgggaagaacacaataagtacaaacacaacacagttaaggtatataagatgcttaaaatacttctggcagactctagaagttaagcattctatcagtattaactacaagcattattattattactattatttgagacagagtcttgctctgtcacccaggctggagtgcagtggtgcaatctccactcattgcagcctccgcctcctgggttcaagtgattctactgcctcagcctcccgagtagctgggattacaggcgcataccaccatgcctagctatttttttttttttttttaatagagacggggtttagccatgttggccaggctggtctcaaactcctaacctcaagtaatctgcccaccttgggctcccaaagtactgggattacaggcatgagtcactgtgcccagcctactattattattttttgagatggagtctcaatcttttgtccagattggagtacagtggcacaatctcagctcactgcagcctctgcctcccgggttcaagttattctcgtgcctcagcctcctgagtagctgggattacaggtgcgcaccaccacacccagctaatttttgtatttttagtagagatggcgtttcaccatgttgaccaggctggtctcaaactcctggcttcaagcgatctgccggcctcagcctcccaaagtgctgggattacaggcgtgaggcactgcgcccagccaactatgagtattattaatcaaaacaaatttcacccatcggttgtagagaaacacagaattaaaaaataatgactctgctctggagaattccttcatagttaatgaaatatcattagacccgtgtactcaaagaacagccacagaggcagcatcggggagattttagaaatgcagagcctccaatctactgtgttagaatctgcgttttaacaggctctccaggtgatttgtgagcacattcaagtttgagaagtgctgaaatggagtagcccaaggtttatgtcgaaacccttaggtcacttgcactttgggtaggaatcatgcaaaaagcaggactgactcagaaagtctgttatgccttcttgatgattattcagctctaatctggaccgcagaaagcaggttgcggggtagaagattgagaccactggcacctcaccagttagaaggcagtctcatcagaataaaatgtaatggatacatcagatgccctcgtggaacaagtataagatcctgtaactgtcctggcacatatgagggggaggaacaaaatggaacacaacacttttttcttttttttttagatgatgtctcactctgtcattcaggttggagtgcagtggcacgatcttggcttactaccacctctggtttccagggtcaagcaatcctaccacctcagcctcctgagtagctgggaccacaggcttgtgccactatgcccagctaattttttgtattttttggtagagatggggttttgccatgttgcccaagctgtcctcgaactcctgagctcaggcaatccacccacctcggcctcccaaagggctgagattacaggcgtgagacactgcgcctggcccacaacactttcaaaaggaggcaataacattagaaaatctgcaactgatttttaaaaggaatgttaggagagaacaaaggaaatggtgcgagtcacttacattaacccagggatgctcaagtacttgaacagcagaaaatcgctgatctacatcgaccaacagcatcatggtaatgagctcctgtgaaggggaacgttagagtccatttatctgaatttaaggtgaaaagctgtatgtgtgcaaatgcaagagttctcttttagtttcgaaaagcatttgtaaaagctctaaatcttaaatacatcaactccacttacctgtggctatttatcaccttcaaaagttaaaaatggtaagcacttggaattgtaaatacatagcttgtggttgaataaaaattaaattaatatcagaatcattttcataaaaatgtttgtaatagaaaagaaattatacaagttaaggaattaatattcctttctttgtctagcattttgcatgttaaagacagatttattaattagtttaatatagaagtcacatttaaaaaaacactttacttaaaatttcactttagcagctgaaaggaaaaatgaaaatttccccctaatttcaagacggcatacttaggtttgaaagaaaggtatgaggaaagacatagaattgggtctttccccaattctgggtggcaagatagaattgatcctttagtagctaaagaattctaaagaaacatgttacaattgcttgaaaaatttccagacaaatcaatacaaagaaaaatagaactattgagaggtaaacaatttcatcatcctgaaattaatggaacttcctcatgagctcaaatggacttggaccaggaatgctctacctgggtcttaacgatgagtatgctatacaattgtccactctggattagaagttcccatgtcacaaaatggttagatatgcattatccagttccttacatacacaggctttatagtaccactcgggaagggggtgatttaatttcattgagggagagagttcactcagccttcttcattcagtttctaacttggatcagaactcgtgaaagtatctgctgtgtgtgatgccctttgcaggtgctatggaggtgtaggagatggtcctatttgtcagtaactgtgagccctcagatcctgcagtgatggcatggggagctggacaggttcctgaagagcccccggccctgcagctgtatcgtcccatctcctttagcctgcgcctttctctgacactccctttctggcagcttcctggacagttgaagaaaatgagagacttgcactcaatatgcatcattttctacacaaagtggtcatgtctgaggggttggcttttaaagggaactcacattcaggacatgacaaaagcaaaggcataaacattgagcaatcaaaagataattatttctcaagataattattgagaacatttttctcaaatttttaaacatttaagtcagcactcggagacataaattttaaaaagagcaatgaaaaggttttcctttttctcctcaaggtctacaaacatctcaatgtaagatttttatagccttcttagaagttgatttatcataaatattatttaatgtggtaaaatatacataaaatttaccacttcaaccattttcaagtgcacagttcactgacattcagtgcattcacattgttgtgcaaccatcaccttcatccatgttaaggactgatcttttagtttcatgggataaaaacaatgaaccttgtgttttcctccccctctgcctctaaatcctggctattattcaaggttcaacttaaatcatagcttccccataaagtctttcttgatgatttcaacctacgttgaggttgagttttcttccttctgattaattgatggattcattcatatacttgttcatttattcagtatacattgagcaccagtatgctggtcatactttaggcagggatagtacagcaatggacaaaatagataaaaatccctgccttcgcagaatttgcattctagtggagagagtctggaaatgaactatataaagaagacatgcctacttatttatatctatctttttttgggtagagagataggtagttagatagcacaccagatggacacacaggtgttaagtgttctggagaaaaataaaacagacaagtaggatacagcaagccaggtaaggtttaagagatgcaattggaaccaggatggtctgggaaggcttcactgggaaattaagtcattaagtcaagagctgagagaggtgaaaccacaggccatatagaaatctgagctgggctcaagcctggcgagggtggggcacagcaagaggctatagcaatgtcactggaatggcacctgagagagatgaaggcagcagatggagacacttgataagtacttgttgggatgtctgggaacagatgacttgatgactgtgaaatcttggaaaacctagcaattacaactaaaatgtgtacagaaatcatacttatgatgtcattagtttctttgcacacaatgatttggaaaaataattccgttaagacacacagaatatagggaagaggaaggcactggacacctacctttgcagaatcggaaacattatcccagtatggagaaggaaagtccacctgccccatcaaaatctgatcaaaaagcacctcctggtcatcaccacttctgtttaggtgaacgacaacaaggaaaaacagcactaagatatcaactcagtgtacatcttttcagtcttaggcactggagcccttcctttccccccataaatgtgtaaaaatgtgtatttttaatcgattgaaaaatgtcaatgtggatctgttttggtaaattaagaaagagtttttgggccgggtgcggcggctcacacctgtattcccagcatttcaggagactgaggcaggtagatcacttgaagtcaggagttcaataccagcttggccaacatggtgaaacccccatctctactaaaaatacaaaaagtaactggtgtggcggcgcacgcctgtgatcccagctattcaggaagctgaggcaggagaactgcttgaacttgggaggcagaggttgcagtgagctgagactgtgccactgcactccagactgagcaaaagagagactctgtctcaaaaccagaaagaaaaaaaaaaaaagaaagaatgagtttttaatgatatggggaagaaatatggaaggcatataaattagcatgcatgacataacagggaaaaaataacagggattgcaagtaaagttcttgtgctcttttcctgctgcaggctcctttgtgcaagaagggctaatggatcactcagagagtagagaaatgctttgtcggcgctgaataaaagattgttgcccatacccacggaatggagggaaaccacacagcaggatataagtgattacacctgctgcccagatgtccaccttgaggccgtatctggaaaaataagggatgttagagttaggagggtcaggctcggacaaattatgcagcttggtaaaatcaatgactttcctcctccaagccaaaaataaaaccaaacaaaataacaatcccaacaacaaacgctaaactaaaacccaccacctaaacagagttcaaagaaaaagtttaaaaaataataattttaaaaaagaccaaggtgcaggaataaaaatcaaaggaatgcattgctggacttatttgtaaatatcagtaaatgaaggttttcagcaaaaaggtttattatagtaataacaattctgagataaggatggacccttgagataaactccctcactttaggaataataattatttctagaacgttttccaatttatagagcactgacatacatgatcgtactttgttttcctagcaactctgtaggttggacaagacaagtattgcttattgtacagaagagagaaaacaggttcagatgggtgagtaattttgcttaagatcacacagttagtgtcagagctggtccccaatatggtcttcaagacccaccacttcctcccagcagcaagcagagcatgtcccagtagaaagtgtgtctgtgccccaggcagccccacctgagggaggtcagacaaggctatggatgtgggctcccacctcattcaaatttgccaagtagcaaagtcctcattccctcacatctcgcctcaggaatttccctattgggattcccttctcatctatttggtttttctgcccttgtggtctatggtacaagcaaaaaacaaaacaaaacaaaacctcgaaaaactatctccaactggtcacaggggagagtgccacctagattcccagctgtggactgaaactgctaatgagaagaaaaagtagggctgcctcccctcagtgccccaccctgttattccttctgcttaaggatggcacctcagagcctgcctatggcccttggtaagaaatagggcttcttaccaaaggagtctttgactcaggctgacctgagttcaaatcctgactcaaccactaaaactaatcatgagcttgcatggtatctaacccattagagtttcaatttattgaagtgcaaaatgggaatcaaaccatcgactggaagagtaagaagtaaaggagtttcaggcctagcatattgtggggtcttagtaaggaataggctaccccacccttctccccacattcatctgattctgcacacagaaaccaggaaattcccaatggtccctgatgcctaagggtgtttgtactccacggaaaatcaatggatccccaagaggtcccaaatgggacctggactggaggataagggcagcagagagaaataactgcaggagactgtaatcaccgcacacggcagtgtctgtttcttttatctccaaatgagagttaattaccatcgctgtgtgtttctgttagtctgaacattttttactctggggttaataacttctgttctacctttaacaaagaccaaatggaagccttaagattgcagtaattgacaaaacagattgggaaaacagagaaaatggctcccactgtaaatgttaaagaataaaatacaattttaaaaagagtggaagaaacctgatagctaattatgtctggatagggcacagcagtactatttttcctattctcgaagcgggctagttcttttgcaagcatagcacttaaacataagagaagcatttacccagtctctgcaatgatttctggagccacgtatgttggggtgccacagactgtgtacagggggccgtctacaatggtggccagtccaaagtcacccagcttcagtgatttgctgccatcttggtgctcatacacctaaaacaaaggtaaaaatcacaattgtctgaaaaccaagagctcaaaagccctttcttgaagaaatgaggaacactgtgtttaaatttaatgtataggaggtaaaaaataaattaggcaattatgcaagaatggatatacatacaaaatagcttacttcctttagattactgcaaaactggaatcatggtgaacacctaacaaatggaaattgattaaataaattatagtacattcatacaacgagaggttacatgaccttaaaatggcgatacaggtttatagttattgaattatgtttgggaaatgagcagagcaattttcagattggtttttataaaatgtccattaaagaaaaaaagtacatacaaaaaaaaaagaaaaagtctgaaagaacacagtgccgatgtatctgtctcttggtggtaggattacaggttttcttaatccttttgtttatctgtctttgatgttgtctataattaaaactgatttgcataataaaatgaagtatagaaagtccctagtgcagtgtctccgatttatgaaaataatctctttgtttcaatatattaagaaaacttgccgggagctgtggctcacgcctgtaatcccagcactttgggaggccaaggcaggtggatcacctgaggtcaggggttcaagaccagcctggccaatatggtgaaaccctgtctctactaaaaatacaaaaagtagctgggcgtggtggcgggcacctgtaatctcagctactcaggaggctgaggcaagagaatcacttgaacccgggaggtggaggttgcagtgagctgagatcaagccattgcactccagcctgggcaacaagagcgaaaatctgtctgaaaaaaaaaaagaaagaaactttaaaaatgcaattctttagtaactaaatacaaaaaaactatacttatagtaaaatactttattttcagtgcctcgtattttcaacatgatctatttacatttcttaataattgaaagagatattaacatttcatttcacctgtggcaatttggaaagatttatcaggtgcagagtcagcatcctgtccaggtttcccttattaaggcagtaaaaatcttctctctttcacccaacaaatcaagaaaaggatgcatgtgactgtaggcaagtatttatactcctttaattccagccacgatcaaaacaaatggagctgctctaaaaagtatcccaaataacttattttatttcaaagaaaagatgaaagggcgttcagaatcctaattgagtcccctctgttggaatgaataagattaagaaaagaaaaccacagtaaaaggctagtaattccagcaagggcaatcttcacgaatgcctcaaggaagcagctaagttttccatgtacatcaaaatacttgatccagcaagccgaggcttgcatattctcctgttctcactctgtgatcatctgttacttgctgcagtagtttgaatcttttgcacagcaaggcacatctccacacatcaggggcaccgctactgttcacacgtcacgtctgccttcctttggaaaaagtagattaactttgcgtttcactgcaacacaaaatgcagatgtttggccagctaagctgcaatatcagcaatgatcacctggatccaacagttttggcagaagcaggcagtcagatccacctatctgaaagactgcatcttttctgagcagaaaatattcttttacgttttctccacactcatagcatggagtcttattcccaggagctgttgatcaggatcaagtttgggctgccctctggcaggtatccgaagatttgtgaggtcacctgtgattgggttgttagggcaaaaacagccatatgtccctcacagatgtggctttgcccagctgtcatctgggacggacattttcttcctaacttaatgaagcagctgtccagccttggtcacttagagttaagttaaaaactttgaggcatcacagctgcaaaacacaacatcggccccagcctaactgttcttaggcaaaagaaaaccctaagttgtagtcttaccacgtcagccattctggtcatccaaatgacaagcaaatgtttttcatgaaaagaaatctgagatggaaacatctagtagatggtctcgttgatttccgaggcagagcagaattgtttacttccttaattccattttgttaacaataacctttctaaaatgcaaaataatctcctgctttgatgttctgctaggtccaaacattcattctgtgtgctttgtgaggtgatgcagattgtaatttattcaacccacttgatgcaggaattttgtagcttttttcttaaacacagtatctacaccacctaactgtactcaaaagtttgacaaaagcagatgttggtggattcagtcataagtcccattttagttctaaatatgaccttgtaattctcctatatgtaggaaaagttttcttttcgaacatctacattttaatagaaattccatctaacatatagccatagaccaattatatttaatatgaatgaaaaatatagttcaaagtttcaataactaagaaaaaatcactaaaaatcttccttaaaataaagaaaatgagtactaatacaaaatgattattaaaagtaataataagtctacgaaaatgaaaaccattgaaatacatagaaccataattgtgatgttctttttattccctgtacaatggtcttttaatcacttgcacagtgccccgccccgctttttttttttttttttttgctttaaaaaccacacagtaggatttttgtgaacataaagaggttcaagggacactcaggagagaaaataagagcttaaagacaaaggccaattccatgtaattgaaaccatatctagacacaagtacatttgaaatgctgcaaaaaaaaaatgtttttgcaggtgaataaatgtccagtcctctagtttggaattctgtttaactcactgtcaggcagggcaggaaacaaggtcactctgttttttttctctgtcaacactttgggaggaggatggagaagaatatacttcagtgtttcttctccagtgggagagcccttccctcagtggtttaagaagccctctctcaacggggactcttcattagcacctgctacggcctgagctacgtgcacccttatctcttactgagccagttacacaggggcatgactgaggccatgtgaaaatataattaaacgtttgttaaaaattcacagattgctaaatacacccatttaaagcctgcacgcgcgcacacacgcacacacacacagcctcacaaaaccatctccagaaagtattattccaaatggcagccataaatccactttgaactaaatttttaattaaaagttagaaatcagaaaggcttctaacaagttcacattgaaaatgccaaatccttggcttagactgctctctggattgacttgttacttggcgttcctccttattctgaccatctttcagaaagggcatgagcaggctgcaagcgcaggcttggacaggctggtccagctagtggagctgtggtgtaagaactttttgccataactgtattttaaagcctctataaaatgtgacccacacgtgaagtgggagtacattaattgtcagtcaaggagtattcacaacatgaggtatgatttaatgttcatccctggtcctttaagtactatagatgttcccccacattttaaacactgaggggctattaaagggacagggattagtgcaaattacccagtatgtagtgctttcactgttttaactaagcaataaaactgtgtaattgtacaacactaattgaatgcagctacacataattgtgggctgccatatgtatcatattaccataaagactgtcagtattttgtaagctactcttgggatcattgcagatggctacagtcggagaagttgttctctagggtttattatatggctataaagacatcctatgatttgacagactaaatgtgttaaatggcaacaattatgaaaaaggttccaattaaaacctgaaggcatatccaaccaagaacagatataacgaaaggtcaggtatgtagattttggggcacactggtattttgcacaggattgtttttgaaaggagggttttatttttgtttcttttttgtttatttggggttttgcattagctacaacttactgaacagtagatctttaggcatatgcttgatttcccttggatgggaaactgagaccatttggaaaaattatttgaaaaaataaaacatttaatatatagtcataaaatgcagctggtggccataaaataatatgaaaattcacagataacctgaacccagtcaaaaggtttctgagattcccataatatggcactaaaagctgactaatgtaacagatgtgttggaacaaacgtaattctcagtgtttctacgaatccaagggtaaccctgatgaaacgttggctaatgaattattagtaaccactgaaaactatttcacagaggagctcagtaggaactaaaaattatttcaccaaatagaattgaacaaaagtggcatgaaattgacaaagccatgaaaaaacgtcaatttactttttaacatatacggtatccctttaaaaagacattgattttcctcttgctacggtatatggcctttatgatgctttctgaggaaaatggcttaaatttaaatctttaatctttaagaaatgaaatataacaacatttaagcagggagttattttatagaatgcattttatggcccatgtacttttgaattaaatctcctggaaaaacataataaaaaaatttatacctacatgtaaaatatttatgaaatcaaaaattaaatgaaataataaaaataatgaatgttgtgcagatgttagaaaggagtaagtcagaagagaggtaattaaacgaaaaagtaaaattgctcttcaatattacactggagatatctgggaagatggagaagtgaacggaaactccaggaaacctgattctcaccctcaatttaaaatagtcatgaaactatcttaaaaggagttctatgcagctgcagcgagatacacaaaacatgcacattccggattctgttaggaattatacatcccaggattttgccaaaactgtgggaactcaatgccactgcaattttaaaaaacgttattacatttctgtcacacaattattatccaatatgtcatagtaggaaaatgatcactatagacgaaaaggaactaaactcacccataatcttgacactcagaaataaacactgttcatattttgggacatggacttccagagctttctttctctccttcctatccttctttttccattgaacaacatatcctgaatgtttttccgaagtgaatcgcatatatctatacaattactctcagtggctgcaggatattccatatggcaccatattagtaatcccaacagttactattaccactgtcatttattgtacacacaggacataccaggcattgtgatgaagacttcatgtgcattttggcccatttgatcttcataccagccctattaatttagcactcttactcatattttgcagatgagaaaattgagattcgaagatgtaaagtaatttacccagtgttacacagcaaataagtggcagggccagaacttaaactcagatatgtctgagtccaagagtctaaccaggatgtcctgccactactggtggtctaaccaccattgtgccactatttaattcatcagtgccctgagataacttatctccatatataccgtttgggttttttttcctcatactgcaaaaccctgatgtgaacatccctctggatagctacatatccagtttcttcctcttaggttacatttctagaagtagaattacttggtcacaaggcacacatgttattgaaggttttggttatatattaccaaattgcctctctgacaggttccaccaagtgactctcccaccaacacatatgagataactgttatcctcttaactttgccatcattgtatgttatttttaatttttgctagtctgataaggctgtgccattttagaaagaaatgagtgtcatctcttaatgacagcagaaaggagcagtgaattagacaaacacagacccaccaaggtgacacaaggtgaaaatcaatgtcttcttaaagggataccttttccttcctgtcctcatctccctgatgaaatcacaggtctttgaacaagaggcccagtaaacacttagtacagtaactggccaattacggtactaaataatgctttgggaaaatgttgcgtcttctattttccctcaacttccatgcaaattcagagagtagaattttttttctaaacacccccaaaaaaaggatcgttcagtttctgcccggacactcacaatgactacaagctaccagtaataaaggacatttaaatttcaaagaaattagattattaaaaagtttttctaaagttaaccctaaatctcttgcccactaatatcttctctttaattttagttccatgctgtcatatacagtacaagaaagttatcccgtcctccatgtggcagcctttcctatatttgatgagaatcaccatgccccaagtggtacatcccttctctgggtcaaccccaggcccagacagaatgtgttcagagtattaccataaggggtaccatggtaagccacaccaaggactctcctgactctttcagggaaagaagtctaagggcatatgaatatttttagcaggcttgtcatactgagactcacactgaacgaacagccttctccaggtcaactaatagccttttgacctgcagtcaggccaagtattccattactgtttctgaaattgacaataacacaactacaccaaaactaacttagtctctagggatttatgtttatctcttgtttaatttcttcttaccagttttggacctttatagagccaaaaatatttttggatttcacttctgtcattggtataattcatcttcatttgaagtcactggtaatgatgaatagggcaggattggggccagactcacagaagatcactggctcccttcctttgggtaacctccaatccattagtcaatacactctgagggctcaagttctgtgtttttgtccatgacctctagacccattctctctgtggcactcatcttgtccaccagtgcagttagctatcctatcaccaaatggatttatttggagaattaagagtcatgggattaaggtgaaggaaatatgttatcttgtgagcatggaattgaaaactaggaagagctggagcacaacctgtcatcgtcatttgggtggaacaggactagcttattgctagatataatccactgcgtgaaaacaaggaccatgagttgcacgtgtcattttgatgggcagctgggagcaggcacaaacacttgaacacagagtttctagccaaggagaggcagtttttctcctgcagggtcttggggactttgggagggaaaagatttttgaatgtttatatttgaagaaaacgactatgtttgtttctggaatctaataaaaactagtgatgtgagttatagtttggttagtaaagatttacttttcataaggaggaggcatctgtgtacacatttttgaaagacctgcccaggtccttgaaagaaacacaagctgctactgatggtttttattgctaagggtacaagcttgccatctagtggtgacttgtgtaaactgaaggtattaatttttttttttttaattaagcaaaaagttcctttagtcatgaaccatcatggcatgcatacacacatacatatacacatacacacatacacgcatacatacacagtggtcccatgcctaagcccatctggagaagcatcatactttctcccactgctcagtgaagtttacactgaggccagtgtgagaactccgtctaacaggccagttgggaatgttttgggcttgccaggcggctctgtcctctgttcatagaagtatcactcattcactcactcactccactcatccactctgacgtccacctgtccatacaattattaagtaccaggcatgacaaccagtaaagcaacaagaaccatgtaaaatcatgggcatgatcaatttggggggaaaaactttagttaaatacaacaataaatttataaggggtattttttattgggtcaatgcccagttttcacctaaaatgtggctgaaaacatccctgtaagtcaaatcatattttctcatcaaaatactttaacccaaccaaacactagagttaaataaatcattcatacaatcaatatagatccttaagaccaggctacatttttatgctgttctataagaattaaaaataaaaaacgctaaaagttctacatacacaattatactgtgtacaatgaaatctatagctgaattagatatgtattaaaaatactttgctagttataacaaatattaatctaacacttagctaacaaaaatcttgttgtcagtcttacaatttagaagggttttataagccttttaataacgtagtaaaacaaagtatgctgtgaggtctttttatgtatttgataagtttccctataataagtaaatggattccaaatctttatattaactttattataacattttcaaaaaatagtctatagctttacattttgccatgaggtggcaaatccatgcacaggtgaatagtaaaatttctaaagcaatataaaaaaaaaagggttaaaaagtgattttcactacatatattatcgttaggcagttttattttaaggaatactttaatttcatttttaattacaaagaaaggggaaattttcaaaagaaaattaatagttatgttatcttcatcaaatccccttaaagataaaggcttgaaggaggtaccttcctcaaggtcataagaccaggcagtggaagagtgaaccgcttggttttgaacttttgtccatctgactataaatcctgggtgtgtgagggtctaccttctgtgatggttctcttatttccacaactctcaatagaatgtgaaatcaacagtggtctcatgtgcaattagtgacatcatcctagttttgttaaaccaggacagaataagttgtgttaagttttgctaaacttatttgaactattttatcctataatagacttatccctgcaaaattcaccaacccctaatccctaccatcagaaatcactgtaaaggagaataaaatctcgttagtttttcatatagatattttaaaaccacattataaatgactgcaattgtttctccatatagttcagcttcttaaattagaagagaagggaaaaagaaaggagagaacattttttttcttttgtggtaatttaaagtaaaatatatttgaatgagcataatacattagaagtatcacgtaaactgtaattttagtaaaagtgcactccaatgtaatcacttatggcatttacagaaagagataacacttcagcgaggagtaagtgaacaatgggtacacaaaactgagcagcaaaagcaaaaaggaaagaaaatgaaactttaattttcagtcgctgaagtttgggagcttagagaagtttttaaacaaaggcccagttgtaagtctgttcccatgagacaatcctacataattcaagacacaggaaaaatgagtgcagatgagagaaaattgctgcagttgatggaggtaactatgcagaagaatatgtttaggctactgtgaagatgaggaatttaaggtgcaattaagtcagggctcagtcacttgacctcagctgccttttattagccagtagctacaagattaccagcataattgcaattaactaattgtgtgcatatttgtttcttgaatgcttatcttttctgcttcagcgtcaacttcatgaagacatgtgtctctcttgttccctggcacagtacctgacacatagcaagtactcagttaacctctccttaatgcagagcttactgtagtgtagtagtatgagctaaggctctggaagtcagaattaggttgagaccttggctcttctacttaagagctgtgacaaccgtgggcaggtcatttaacttctaggtacccatgttccttacctatgaaatgaaacagtaatagaacttacccaatgtggttgctgtgaggatgaaacgagataatgactgtaaagacgttagcacagggccaagtacatagatggttctccatcatggcggatcttactagcttttatttgtgtcatgggagttgggtggctcatctgcttttagacttgagtgtgtatgcgggttacctgggggaggtggctgccttgtggatttctgcaagctgtcatcagtcactggattctgatttggtagggctgcatctaggcccagaaatttgcatttttaacaggcatctgggaataattttgattcagggagtctttagaccaccctgcagaaacactactttagaaagagaatcctcttttcccagatttctgaagagacgggcaaagtaacagaactcatatatttatacataatgctcaggggtggataatgaaaggaagaactagcatctttgggaaaagatatatatataaatatatgtatatatatatatatatatgcacagtatatagaaatgaaatatatttcattaaattccagcctgaagagccagcaacatttatattactcccatatttcccagtgaagcaccccatacttagtctctacctcctctttttttcctatgtattccccttaataactgggtgaggaaggacccccatttgcttttgtggagatctctcaaggtttccccagagatgtggagtaaatgaaaagcaaaccaaatagtgtaaagttgggggaaggatgtctccgtttttaaaaattagtctttttcaaaattgtttttatgctaaggggctagagtcttaaaaaccaattataatttttttttcttttaggttttggatcatattattgagctgtaaagttgggagactccaaaaaagtctaaaagggcttcctttttttttccccaagtaaaaacttctttttacttttcttttctttcttttctctctctctttctttcaagacagggtctcactctgtcacccagactggagtgcagtagtgtgatcacagctcactgcagccttgacctcctgggctcaagagatcctccagcaacctcagcctcctgagtagctgggactacaggcacacactacgatgtccggctaattaaaaaaaattttttttgtgtagagatgggggtctcactatgttgccccaactggcaagtaaaaactttctaacataaaagtgcctaagataaatgacatttgtgtctgtgtaacttgtcgctatcttgtcctagcccaaggtgttcaatacagccctacccttcgcgagttcaattcccattcttgtgcctggtttttgtttgctaataaatcaggtgttcttaagggcgcattaactcatctagatcaacctaaaaggctagtttccaactagctcctgaaggctaactggaaattaacctttcaggtaaatttttaaaaaaagaaagaaaagaaaaaagaaatattcatattccttcatgagtgcttggaactcaggatgccctgtaggtggaattcctcttaccagcaggttctctggcttgatatcacggtggacgatgttcaggctatgcaggtatttgatggcgctggctaggttgtacagcatcccactggcgtctctctcggtgtatttgttagtggaagtaatggcatcaaaaaggtctcccccctgagaagagaacagaagctgaagcagcacattaacagacgggccagtggggccacctgcagaggccattgacaaaccccaaaggacaggaagaatggatgtggaatctttgggttcctaaaggcttttcctgctactttcctttcaaaggctcgaaggctgaatggtgatttctccacccactacaaaaaccagtggcatctcccccagagctcaaagaaaggggcagcgtgaggattctccaccaccagacacatggccatttccacagatcccagctaggggacgaggagatgcagctagatctccagggcagaggactgtgacacgtgaagatcccagtggcatgtgctacctgcctcacattgactgccagccagagttcaaatttgtaatccttcacctcctccagtgaggaacaggtaatactgcaaactgcacactgaaaatgttctactgcctagtgaaattattaggatgcacacacacacacacacacacacacacaatccccttcatacactagatttagctctctgagagtgggcatagtgttttctttttcaatattgtgctcctttgtaaggaacagagaaaaagaccagaaacttcatttcaaagttgagtgagagaaggagggaggaagggggggaaatctcaaagaaagttttctaggactgtcattcatctgaacttttgtttcctttgctcctttttaaatatattgctttttggtaaaatggaatgatttttaagttccaacctaagttccatttattcaaaaatcctttcagagaattggggtctgatttactatcaatatgtgcatcatgcttgcctacagtgtaccaaaccgctatgcacagtaaccaactgtgatcatctgttacctaatgcgctaaggaactcagttttctttttaaaatagctaaagcaaaagatagcccctgtaggctgatgattttcaaatctgcctctcgggcctgggccctctgtgcccctgtacagtctccactctggagacttctctcactgtcccccaagctgcaacggttctcaagctaaccacacaaattttttttttcaaagcaaatagttttttcaactttctgcttctctcaaaggtaaggctgctacacacaggttttcaggttgtctctgtgccacttgaggaggtgggacagtcaccgtggtctatgtgaacagcacccctggagttccaccacagggcatgtgtggctgtatatggagaccctgcaaagattccaccagtcccagttatctgggctcctggcatcttgtaatgtcctttttaataagagataaggtcttgctttgtcacccaggctggagtgcagtagcacaatcatggctcactgcagcctcagactcctgggctcaagtgatcctcctgtctcagcctccagagtagcgggaaccacaggagcaggccatcatgcttggctaattattattattttttttgtagagatgaggcttcgctttgttgcccaggctggtctccaactcctggcctcaagtgatcttcctgccttggcctcccaaaatgctgggattacatgcgtgagccactgcgtctggctcctttcttctttgtcctcaacaatgcagtcaacaggtcttatcggtcctttcttggacacgtttttccttcgcagccatctgggccttcctactccgccaaacgctcctgttgcctcatccctgggttgttgtcatgtggtctcacaatccgttctgcttccctccgtgagctccttatccaaagcatcctgcacaccgactgctaccttcccacacattatgtcgctattttctttctctcttcaagaaatcaccattcttttcccacagccgaaaggaggaggctttctatattctgccccaaccttcattccaccctgtttaatttcctgtcttgccactacttaacatagtgaccctcacactccaggatatttcttccctagccatccaaacaggccaagatctctgtcctcaagcctgtcctcatgacagcgcccttcctgaagtgtcccatcccctccccttcagttttctaactcccgttgctctctcagggcccagctgcaggcccagctcctccacgaggcctgccttcctctgaacacataggcagcctgcgtgtgcaccgcctctggaggcagaaggctaaagtcctgtgcctgatgagcatggaatttcattctcattaactgccgatccactgccgtccggaacatgagccttgtttgtctgagagcttcaggcattctttgggacatccctgggccctgagggtttgagaagcataccccacccacatgtctcagtggaaaagtcctgggagtctttcaagtcaagcctggggctggccttcacttccctgggaagcttctcgagctgtcctcagggcgttctgggtgagattaaatcgaagggtatggtcttgcagcacaattgagggtcccagcgctgggctacagagaccttctatggcctttctagggtatcttggtgatgtagagagaattcacaaaggcagttaagtgcaacgaggaccttaccatagtctcctaaccaagcacacgattgacagactaagatttctcaccaaatgcgttcagagtgcctaagcctttgccatcttgaaatttcatttagtctcagcactccaaaaatcagccaacagtgggggtaagtcaataataacggggggtaatcaaattctaacagcacatagaagggcaacagaatggcttgaagttgttagtttaaaaattaacattgttgtaaaaagactccttggtactggggaaagtataatttacaatgttggtaaaaagataatttaataataaagcaccaacgggaaaatcttcatattttttctttattcaaatgaaatcgacttttcttttttatttttttttgagacagagtttcgctctttttgcccaggctagagtgcaatggcgcgatcttggctcactgcaaccaccacctcccgggttcaagcgattctcctgcctcagcctcccaagtagctgggattacaggcgcctgccaccatgcccggctaattttttgtatttttagtagagacggggtttcaccatgttggccaggatggtctcaatctcttgaccttgtgatctgctttcctcggcctcccaaaatggtgggattacaggtgtgagtcactgcgcctggcccatgagacactgcccagccgacttttctttattggattttcagtttaacatttttacctccctcagcctcaaacatgacaatacccttgttactaaaaaaaggctcccattctttgaaagaaacaagtctggccgggcacggtggctcatgcctgtaatcccagcactttgggaggccgaggtgggcggatcacctgaggttgggagttcgagaccagcctgaccaacatggagaaatcccatctctactaaaaatacaaaattagccgggcgtggtggcacatgcctgtaatcccagctactagggaggctgaggcaggagaattgcttgaacccaggaggcagaggttgccgtgagccgagatcgtgccattgcattccagcctgggcagcaagagcaaaactccatctcaaaaaaaaaaaaaaaaaaagaaagaaagaaagaaagaaacaagtcctaatttgaagtagactaaaaataaatttcacctataaatacaaataaccactaagttaaaaaaaatgccaatatgtctaaggtgaagcaattctaaataacaaaaacttaaagaccctagaatgaacatttttcatatcatcgcagattagcttactaaatgctttcctcgtcttgaatttttaaaagagaaaacctcacattcaagtcagcagtgtagggattccaaacatgccctgggagcctgaggcgccccctggcggtgctcacagctgatgcagaaggcggtgcaaccaattacaacattctccaactaaggtagacattacttacacgttcagtttgatgaatatactagaaaagacttgagaacacaacagcttcatgaaaatgaagcatgccattttttaaaacttctacttcccgaaaatgtcaaatgtatggaaggagagagaacaggtaagagacctttcatctccattcaaccgtcatcaacaattggctatcccgatagtttgttttcatagaataagaaggtaatattatgtgacaggatgagattacgacattcactgaaagtcagtacactattcacatcattattaggacagtgctattttcccattatgttggtgactaaaagtttaaagcttgtttttacaagatggctggtacctttggatatagttcatggaaaagtgaatgattttccattacaacaacgacaattgtattggtacctaatgctttgtgtgtcacacaaactggtggaagccatctcttcatccccacaataacaccattaagcagatattattaatattctcactttacatatgttgaaagtgagacataaagaggtagacccaaagtcatgggcctctttgtgccaaggctgggacttgagcccttgtgtaccattctcctgtgaacattcctaatcactgggccaatgtacagaaatgagaacctgaatactgatgggagaaaataagggaaagagctctagaatataggcaagtgcggtgccatcaataaagacttactttctttccaaaatacacacctttactaattccatgacaagatacagttcagttggcacatccatctcctcaatcagaagaacgatattgggatgcttcactcttcttaaaatagacacttcattctggatcatgtgctcctgtccaaaggaaaagttatcttcatcagcttccataaaacatgtggagggctaactcaaatgagtacaactatactatgtaagggtcaagagagatgcattttggtaaaatgtaataagcctgtcttatattctgatattcagatatagcctagaattgccaatagatatggagatccttacataatgcttgcaaattcagaaccaatcatgataactacagtttcatagcaaagaatgggatgaaacttagatcacattaagaagggaagagagtaagcaaacaaaaagataaggaagtgaagtcatatctaatcattccaaataacttttatcccagggatatacataaagttatattctagtaagtgtataacattctattccaccaaaattcaacccttagggtgaacttgtatttgtttgggagtgatctttgtgtttcttttgacctcttgaacactcttatctcataagaacaaattttatacatactttgcctcgacatttgcttttcttgataattttcagagcatactctctagcagtcgatctgcgaagagaaagttcatgtttttaaaatgaaacttaacttcaaatctattgaattattttgtcagggatcaatttcctaccccatagatcttgcatcatgttgtaaatattttgtgaaaggatttcctttccttttttaaaaaaaaacaaataaatatgtaaacgttgatggactgaccaagtgtaaggacagtaagtctgctggcatagagaaatcttgggctatttatgttgccgtacttgtaataaaaacactagcactggcactttgttcctcgaattgcccacttgtccctcttccaagtgtactttccttccttttcttactgttggaaaactttctaataaacttccactcctgctctcaaaacaaaacactagcattgctagtgtgtcttagcttctcctgctgccaggttactcttccctccccttccctccgaagtgatgtagcagcagcctaaagcagagatgagtttccgcccttcccctttcctcaagtctctcctgaggttctctatccacccagggcacctatgacagttttctgaatgttcatgcaattacactgaagactctagagaaagcactccacgctctttagacctcagttcagtgtgagagcctgtgtgagttccgctggagaactcatagatgatatggtcaaggtgtaaagaaagggataaaatctatttcagagctccctggggacccctgggcccttttatgggctgtctcatttctttgaaagaaaatgaaggtgacagtggaaatccactcacttcccaaagccacatggcagctttaaaattggactctgagttctccaggcccctgctccctgcatagcacagtgaacgccgcccctcctctgtgataggtgtaggaggaaggatttagtcgtatcgctacctttaaacagcttcctgatttgtgctaacattgctaagaaactgtagtgacaaacacaagaacacgtctattattaaagggcacaatgcatacttcataatcatagtaaaccacgatttcacaagcattgctgttttatttctggtgtgaaatcgggagagcctagctttttacctatagataaaagccaattttgtggatccaatggacacaaatagtaatgaggttaattaagaacatgcttttaaaataggactttaaaatcttcagtatggtgaattaagtgggatttcctggttatatggttacagcaagaaaatgatttgcctctaagcgaatcaagagaccaggcgttaatgtgttttgagggcattctagaaatttttcatgtcatttactcctaaaaatgcttcttccatgacacttccaggctttttcatggtgccggcctcaaaaaacagtgaacactgaattatgattctatctgctgaataaaatcacaagatgatgacttcgaagcctcttttcctcactagagggctttggggttcaggtggtagaaggtaaaccctttgcttcggggctcccctcctgcagatatgcggctgtccagaggaattcccatagctgtcactcaggaagggaatgcactagaagcccaaggatgcccctgccactgtctctgttgatctttcaacaaagactctgccatggctgggcagagaggccatgatgggatgtgagccaggctgtggctaaatgcagggcttggtgtgctagatgttcccacataaacactagaccaccagcaagactgtggggtagaggaggagaaggcactggagtgtaaaccaaatatttaacattagaaatttaaaacgtgggttggggcagtggctcatgcctataatcccagcactttgggaggccaaggtgggcggatcacttgaggtcaggagttcgagaccagcctggtaaacatggtgaaaccctgactctactaaaaaaaaaatacaaaaattagccaggcatggtgttgcgtgcctgtaatcccagctacttgggaggctgaggcaggaagattgcttgagcccaggaggtaaaggctgcagtgagccgagatcatgccactgcactccagcctgggcgacagagaaatttaaaatgtaagagcaaacataaatgagaaaatgagaaagtgaaatgattcacgtgtgaagagattcttcattgtagaagctctatatcctataagaccacagggtccctctaagtagcttcttcttaagaggctcctgtagagtttgtctacaaacttgaaaatacttaatcgaggaaaactaaaagctcaagtgtttctggattctgcttttcataaattactaaaaaattatgataaagcaaatctcaggttggaatacatgagcaatttcctatctggcttaacatgtcccattggatggcagggaatctagaccattgcactgcctgcctgggtaaccatcagcaatcccaggcaaggccagagagcaagaagggatgtttgtgagactgaaaaataaaagctgccgttcccttcaccacctccacaaaggggatggatggacaggaccgtgctggtcagaagagaaagtggtttcttagcttggtgatttccccatgtttgccatttgatgctcttttcccttgaaggagtaattttaaagcactcaatcctcagggctggtgtagagcacaggagggctgaaccccctttacagccagccagacaagaagcaggatccccagtgagccagagggtgtgttggctcccagcaggccaaggaagcaggttctgtcctgagcctacagctgaggggaagagggcagcaaacctagggcttactaggaacaaagaccttgtggatttccactatacaacctttcgtaataggattaaaccttccattacatctactcatatttcatagtggacaatgagctccacagaggaccaccaaattaatgttgcatcttttcttttttgattccctgagggccgaactacaaagccacataataaaatccataataaaagccacataataaaaattaattcctagaatcacaggtttataggaaagtagctagtctagaaagtgtgcctgaaaacaggtgttaggagactaaatgtgtgtcataagaataagaatataagtgtctgctttaagtgaaaacacttggcaagaaatcgaatcttatataatgaattcgccttcctgcatacctcgaactctgaggactgctgtgcctgtgtaattattcagcagtgggacgcagggctctttggtggattcagaggggaacgagacctgatccttgtctttaaggtgtctatgtttgagtgtactcagaagaatactagatgacctgactgattactggtgaggtgaatacaggccgtttgcttgcttgtttttgaaattatgttcttgaccttttacagaaccctctttaccacaacaaaaccagcagcaacagaaaactttgtcttcctccttgactaagggaaatcaatttgtaaggctgccttcttattaagtgtgacccaaggttagaacccaaactactagagggaaattttcaaattttacaaactttaattaaatccaacttttggtgtttgtgctaaaaatggtttggagacagctgtcttgttcaactgagtgattcccaactcaggccagtcttctgcccactgcacccctcacccagggagtgtagcagaatgcttgtcaaaaaaagaaatgggccaggcatggtggttcacacctgtcgtcccagcattttgagaggccgaggcaggaggatcacttgagatcaagagtttgagaccagcctgggccacatagtgagacccatctacaaaaaataaaaacaaaaaaattagcaaggcatggtggtgtgcacctatactcctagctattcaggaggccaaggcaggagaatggatcacttgagcccagaactttgagactgcaatgagctatgatcttgccactgcactccagcctgggtgacacagcaagaccctgtgtcaaaaaaaggtggtggtgtggaaatggctagcaaagattgggatgctctaagctaacatggtttctcttgttgctgttgtttgctatgttttgaaggatttagaaaaagagtatatggagaaggaaaagcagctcccaagcattcctctcccatagcattcattgaatttcatggcaatccttgtttgtgggtaaagttctctgtatggggctgtgtcttgtctctctctgtaaccccagaagtgcccagcataagcctgaactaggaggtgctctgcatatattgtggaaactccagaggatggtggcagttagcacaatgacaggaataccaccctcaacactagcaaaaaggagttagtaacacaccgtttgtttaccaagtaatcctaacaaagcccaatctcagcctcctccataaagagataactgccaagagcagagagcagagaactgaggcattccacagtgtcttgtcagacagctcccaagtggaatttgattttgaatttgacaagggccccatggctctcaggagccagaggctcctcaggaaggaaagaaggaagaacagtaatccactagccaagagcagtgatctaagctttcagcacaaggcatcctccaaattccagttctgatggaaatgctttcaaactatagacacatggtcgctttgttgaggttattgagaattttgaagattttctaggtggaagcaatgcattttggtgaccctaagatctctgcttgttctgctggatttgagcctgcttgtgttcattgctagagccagcagcttggggcacacatcctcaggcttataggtgccggtgggagagacagaagcatccgcagcaaggattttaattcatctctggtgcctatatcactaagcaatgccagcagtgcaggtggggaagacgaccaagagccaccgggggcaccatccctgctcatgactatatcaccccaacccttggctcgtgtagttattagtccacacggagccaggaaagttagggatgaaaggcatctcacatcacgccctctacttatgctctgaccgctcattagagcttttctgctctttgagtttgctatggggcctcaaaatgctccacgaaacagcttcaaagtagagcatgtctcttccagctggagtcacagtccactaacttcctttagtatgtcccaggtaccccagaggccactcaagaagttactcctggagcatgggcagaaatctaaatggacctagctgccaaagactatgccggaacaggaccacagaaagacatcgttattgtgtccattgttgtagacaaatcttgcctgtgacaggatatgattagcagaggagaggcatattcacccttggtaatacatattcatccttccaaacacagcagaatgtacccgcaagcaatgtgtgccattcacaacattcttagctcgctttttattttcttggacctctggaaaatattagaagaatgttttctgatacctctggggacagagggcacatgccatatgtcctcgttcagcaggagccgaatactaacttcatggagcaatctggtgtttaggttctgaagtttcatacagtgagacccaagatgtgaactcacgcaaaacaaacacaatccaagttagaaagaaacaaattgattctggatggagaaatgggaaatttctattgtgagaaggccagtcctgttggaccaagacaccagcccaatccaagaactagctaggagaaacagcacatgccaccatgtcagacttaacagatgatagatgctggcaaatcaccagacaccccacagctcaggggcatggcaatctgctagaaatggggttttctgctacagtagaaataaagccaaaaaaagccagatttactatcagtaaaagcatcaatgaaatataaaattatataagcacacatttatttgcatgcacgcttctatccattaccataggaatggctttcccaaattaattagtcttatttgtacagggccaaagggaacgtgtgtgattttggctcagctaagccagagtcttatgggaggctccttattagtggagtaaagtggttaaaagtgtggtttttggagctgggctcggacctatgtcttgctaagtacttcttacctgactgaccttgggcgcttaacatgtccatgttttctatctataacgtggagacaacaatactgatattatgaaagtattgtgttaattaaatgaaatgtcataaattaaggactttgtagatagtttatgctcagcaaaatgaggttgctcctgctttgggaggtgtgaggcccaggaatgcaatggacattttccatgtttggcacaaatgtgccaaatggccaagcttcgtggagaggtgggggaatgagagggagagaggagaacggtggcctggcagcatcaactcacagatttttcaagctccctatgactcgtgcccctcctggatgcacagtggctgctcagctgggtctctgtccctgttgggaatatcctagccttgctgaagtgttggagtagaacaaggtttgagatcctctgcacaaaggtccataaggaggactctgctacctgagctggggaagcagcttccaaagagccgcaaggggtgccaggagcacataagtgactattggccaaatgaagaaccctcatgagatgtggggccctgtagagactaccagctctgatatggcaggaacctgtgcttctaaatcaaagcctgtagaggaggcaaggtctagatcttccaggccaaagccttctcatctgtcttctctcctcagtcgtcctctctgagtggagcttaggagtgtgattctcggaggattaagaatgggcagggtgtccagccccactgcgggcagagaaaggtgacagggaagtgtgtaccccccagtccagcccccagaaagccagaggacacagtccctcaaggaatgaggcaagttcccccaactttgcagtattctgcccaccagccctgaggagaagctgctggctgaccagctcccctaaagcaagcagctgctcaggaaaagaaacccaaatctgataccgagtggagggcttgaggcccccgtagctgggttgtaactttatcagttgtcacttttccgtctagtagccaccagctaacgtcctccattaggtatctagaacctcaggataaacccttccctttgggccacagagtaccgggttcattcattttaatacgtcttaatgtgttaaataccacttctgttggggtcaatacatatgcattttaaagcttttcaagatgatcgtgtatgtatttcatcctatgctagtatgcattacagacatatactctcacaagaactttctgacctctacaaaatgtcataaaaagtgtgtgagaaaaactattcaatatggtttttaacaacaataaaaaggcttacctgaaagagctggcaacgtctctctgagtacatttaaaaaaatcaaagtctttaatttatagattgtccccaggtatcactacatttttcaaatctgttgttagatgggtctttcttttgcaaaaaattcttttgcatttggggttgagacattaacttattccatatgtgccacagactggaaatagagacacaatcttggaaaacataacgccaaatgtaacctttaaggtttgatgcaaatgatatccttctcacctttctacacattccttgacaacagcaaaatttccatctcctattgttcttccgactttatatcgttctgttattgtagctggaatctggaagccttcctccgacacttctgaaagaatcattaatacttttttattggttgaaaagggaacacagatgttgcacaaggaaacatttaaaagtatcatctaattgactggaatggattcagaatcaatatgtcattctctgtacagtgaggcaactgcctccccacccttgctgacattgtatatactcaacagtttttactaagacaaatgataaaataaaaagaaacgtaaggggtccactcccacctatataagagaaacttgagttttctgatgccgtagggattctcaggaggaagctttgctccttttacttcacgccaatttgatcaatagtgtttactgaatacccactgtgtacagaaaaatagcattcccatgtatggcgcaggaggcaaccgcagttcgcaagggactctgggctgcttgacactgtacaagcatgaaaattgcctgctgtttggacacttagttttactacatcctgaaatggaaatctccgtaaaattcctcatgaactaagcactgatggccacccgtcctcggtatcaacgagcagactttagacaaatgttctcaccagcaatctgcatagcagatgttgagttaaaactacactatctattatgtctgtgaatggaacagttttgtagtttcaattatgttagtgccactaacacaacacattttccccctgaaaatgcattttgaaatattttacaaatgcctaataatgctttaaatatctaaggccataaaactaaataagccacagttaggtcacgtaaatatactgaataacctttaacatcttaagggtgtaaaaagtcttttatagctgggctctaaaatgtacatgttttaaagtgataaatcccagctctccctcaggcaacctgaatgcaaaatgtgatggaaccccggtgtgttttctaaatgcactcctcttccgacctttcgtcataaactgagactaaacatctctcctcaaaataaaactttaggtggtgaatgggctttcttagtagtttttgtattcatgcttgctctgtattgttggagactcataatcatcagatatctgcatgagggcctttcttctcgatttatgatgatgctcagttggcatcaatctgaattctagaggggatgaaatttctggaaagcgttgaacaaatgtaggacatttgctgctgctacttttgtccttggcattggtacagcctcttcacccctttataggtgacatttccctcttaccctgctagaagccatctaggtggtctctagaataaagtgagggctgcagccaatccccctaaccccatctcacccctctaaagaagccacaattttgcctctgtttgaaggactcagccaggggagttttgtctactgcaaagcacccaaatttacaaaacagctcccagatgacacaatcttaaggctctttactatgtggctaagaaaggaaccctccttggctgttgggtacaagtgtgaccctgcaggtgggaaatggaagaaggtacttccattctgccttctggtgggagcattcactgagacacccattcaaagcacgtggcttgggattttttttccttgactattcataaaaggtacctttcctcacttttggttaagaaggctaagccaggctgggtgtggtggctcatgcctgtaatcctagcactttgggaggccgaggcagttggatcacttgagaccaggagtttgagaccagcctgcccaagatggaaaaatcccatttctactaaaaatacaaaaattagctgggcatggtggcagacgcctgtaatcccagctactcaggaggctgaggcaggagaattgcttgaacctgggaggtggaggttgcagtgagctgagatagtgtcattgcactctagcctgagagacagagcgagactccatctcaaaaaaaaaaagaaaagaaaagaaaagaaaaaaaaggcttagccaaaggcttaaatcaagaaccatttcatttcattcaaaggatacaaaacactttggaacaaatgagacttctatgtggctgaatttcatatttctggaaatacaaaaaattctgaagttgcattgtagtcagaaaataattatactgtaaatcacatatttcactgaatataataaaagcacttcccaaagggtacttttttcggaaaaaaaattaaatcatatcatttaaaacaagtaagagaagcagattccttaacagtggcttgatggtatcacttttatcttttccaaatacttccccacagttgatttgaacctggtaacagccttcaggaaggaaataggtgtgattcacaatctccatttcataggagaggaagtaagacgcagagagttgaaaatgcttgtccaaaacaatccagtgagttagtgaaaaagtcatttctggaatcctgatcatttgaccacatcacagagacattctgcagtgaattacctcaagaatatttttgcaatttccaccaattctttttgtaaaaccatatttcatgtattgagttcacttaatttagagtacatctgtgagactacaacagtcaaaagaataaattgtctttaaatttggcctttgttcacttaaagtaacactaaaagtgaacagagtttgggaaaacaaaagcagccacgatcccagcgatcccctcttatttccaaagcaggcaatagctggccttcttaggatacatatgccctcagaggatgggaaatgtctccgaaatgggccaacttccccttcccattctcacagagcagataccaatccctggtgggcaccatattcaaccctatccccttgtgattgaccctcaggagctgctcagccttgtccatgtcattccgcttgagaagccacagtttcttggagtaaatttagccaacccatcctctgcctcctcagataccaagtcccaagctcatcaccttctccagggccatcgttctcatccatcgagctgcagactttggtggacgcaagtgacgtagaggagccgccatgctgagagctctgtaggggaacagaaaccggtaattcaaaaactgggtcagaatgcctgagtttccagggaccatgcccagcccggaatctcaggagaaaactttgcccatgctagggaggatttgatcttaacacttggaaaaagacgccttcagcatattcaactggggccacatctccctctctccctattaaccaagaatagactgtgataacaggatcaagctggttattgtgaacttgaatgttccgtgacttcttattccttttgctcaaaatcggggtcctttagctcgctgtttgggtttggcagagttcaggcatctcacctcactcttccacagactatcggcaaatggccctcaaatgtggcactatactgatcccatccactattttttctatttttctgacagaaaacatttctcttcagtttgtttttataaaatatccttaaaaaaattaaatgctccaccttaccacaactttaggagaaaggttaaagagtggggttgtcatttccatcttgagatcaaaacataagcactgagtaggttattggtttgttaaacgttacataataagtctgaagtaaagacaacaataaaagcctaggccttgtaattttgtttgatttttgacccaagatccatgaaagcaaacagggtaacaactgtatgagagagctcagaggaaaaaacagtaccaaatatttaatattatgattggctatggggcagtactttaacaatgaatgtttccatctctgcatctatttcctgagaaaacaatttgcacatttcaatgctatttctaaatagtgaacacagcttgtcctaaaagatcttccttctgtttccctgggtttatccacttggttggcctgatgggagcaggaggcggtgagggggcgggcggcattggctcatggtgccggctgtctgtggagcagagagaagggaaagagcatctgtagttgaattaataatgaagaggtggcgagaagcaaagctgacctatttttcctctgcttacctgtttcccttcaacctcctccccaacccattcagccttaaagtatgtacaaagtaggaggaaagaggtttgatgtaatttcattatggtctacagtatcctgcataggagattcaaagattttagttttcattaaaaagattaatagagttggggaaatgctgcctaagtcactgcagagccatctaagtcaaacatcacagaacgttttcctgggtgtgactaagatgagcatgtcccattggtcaggttcatcaaagctcacagttgacaccattgggatgaaagttaaagtaatagcaatagtacacctgcttttctacagaacaggctaaaagttgagagatgacccttgtatacccctgaatactacacagtttgtgtaatgtgcccattattttccaatactataaaaatcccccctcagtaagcctggtgacttgagctgtttttctatcttttgtaaccagcagcacacatttgtcatatgtcaggctacaaaaacggattgagattgtcaccttgacacagagtttttcttagtgtgacactatgtacccataacccacactgtggaagggactataaatgtaggagcttctaagccaccctctgctgacttttatggatggacatctttttgtgaaaaccttgtgtttataatattgcagtatgaggctgacacaaggcagatttattatgtcaataaccgaagaaaataaacataaccacatttgaggggaaggtgtgtgttttccagaacagtgagatccttcatcctctgggtcattgtttttgctgcagacataatggtgttccaaacagaaaagcactaagtaaatgtctacaatgtagaccttctcttctgggctttctggaccttgaatttcttccagcagcagcacaaatggtatttcataatggagacacatggtgtggtttaggctagcaggtgctgccttgtcacgtggcgttttaaatttagaatacaaagacacattctttcaccaaattaatagagcagtagcatgtttcctagcaaagatgttcacaatttagacactcagtcccaaaagcttgttcttttagtaagaacatcaggtactcgatacagagctctgacccatagtacatgaaaacatcttttaaactgtaacattctataaacttgtgggctttcactcaaccgccttatcaactaatgaattggatttaacagtgccaccaaatggctgatccctgaatgcttgtcacaatgccagctgggttttctctgctttctgaacaaaaatctctcaaggattttaggctctggtggaaaaaaaaaaaggaaaaaaaagtagggttaagacaagtttgcttatgtttataactgcttattttcaatgttacaactgtatttttgtgtttctgaaaatgtatcccaagtcatttcaaattttctgctgcttgagagtaacagatgatgggcagtcaagagaaaaacgtacttacggtcatacagagttctctgaaaatggaaagctttcattttatttattatgctcaaagacagtaaaataaatgtattaaacttctaatagtattatctcttttttcccaaagaagtaagatagttaatactaaatacttttccaagatggtgaccatccgctgattcaaagagtttgggggactgggatggaccttaaatattacctattctgccccacttccattcagagaccaaatgccccctacagaaatcccagtgggtggtcagatggcctctgtccaaatacttctagtactgaacatactacttcctgaggcagcccttcatcattaatgggaggcaaaataaaggaagttctcctgctaaaaatacaaaaaaaaaattagccaggcatggtggcgggtgtctgtagtcccagctaatcgggaggctgaggcaggagaatggcgtgaatccaggaggcggagcttgcagtgagccgagatcgcgccactgcactccagcctgggcgactgagtgagactccatctcaaaaaaaaaaaaaaaaaaaaaaaaaaagaagttcttctgtaagttatgttgaaattatgtccctccatgtttgccatttattggtcctatctctgatttctagagttgcccagtacaggtctaatccacttttcacatgacagtgcttttaggtgtttgaaaatagctactggtctccgtctgtgtcttccaagcactttgggaggctgaggcaggaggcttgcttgagcccacaaattcaagaccaccctgggcaacatagtgaaaccctgtctctccaaaaacaaaaaaaaaacctggtgcttgaaagtgaatgcaatattctgggtgtgctctgactagcacaaagcagagaaggatagggttttctttctcatgaatagaatattaattcacttcaagatcttactggcttatgtggatgaggccatagcatttcacctttacaatgagcccacagctatgtcatgtctccctggtgtgtgtttgaaaggttgtcctgggccaagtccaggacttcacacttcctcacgttaaatgtcatctttattacattaatatccttccagtctgttatcttttagattctgatctggtctcctaatgtttttgctctgtctaccagttgaagccatttcagtaatcaggatggctctttgggtaatccaccaattcttcactaaaccacctaaatagactaacttagaccctgctggaacatttctattattatccttaagtccaacgaaaggatttcgaacatagtaaaggcaaaatgtgtaagtgcttgctctttagaattaacttaatgagattaaccagcctttgtttacaaccaacggatgctgaaaagcccacctatattttttcattgcttgtaaatggaatcaatttacctttttggtttttctgagcagataaaccattttatagtccacatgccaacaagattttatgtttgcttcaattcgctaattccaaggcatctgggtgtacagtacaaaacgtacagttattttagaatttagggcaattagctgctctgagagatattgtgacatttgaaatgttatcacccccaagcagatttaatgggaaccatttgggcaggttgctggcacctggatgcttttatggcacaccttcataaaagcactgccctaagtaagaacacatcctaagtgtagctattgagcttgggatcatataacagatggagaacatatcacactttttgaagtaagtgagaaagctgacataacaaccctaaccacattttatcaagatgtatctgatgactgtgtagtggaaaagagttcactttaaatggtgtgagttactcttgccatttgtattaatgttgtcactcagctggggtccatgctgcataaaggttttgaaaatatccaattaagagaattgatctaatcaaggtagaaaaatctcaccacacaactttagctttggctggataattgcaccatttccacttcacattttatcttggcatacaattattaccttactgagttgatattgatttgaaaaatggttaaaaataatttagaaatcaagttatcactgtcatatgatttctgaatcaatcttataaaggaaacacaagcaatacatttttaacaaactcaaacagttgtcttggtgatcttgactttagatccacagaagctctaaagataatctctaacaaaattaaataataatcttggtgtagagagcttgaaacccacagaattctatatgatacagaaaagccagacatttatttatttcccaactgggtatagaacaataagttgaaggcatcactctgcaattactaataaggctccactatttgaaacaaggcacaaaggaactgctttttccaaattcctttgtctgcaatcttcatagtagtacattcagcctaaataaagtttatggcacagataagcatgagcataagtaagaatgaatactgaaaaatgtaaaatgttatcataaagatttggataattttttcaaaagactagaaaactgttactcatgaagttggtttactgaaaggaggagaaaacgcgaatggaaacagtggtgttatggctatgttagtgaaaccacgagagccaagatttcaaagacaaatgcacttagttacaactagatctgtactgtttgttgtattgggtagtttttctggcctcaattgtccaatcactatactcatgcaagccaagatctataaattgataatctgaaccatttgtcccaaggagacttgtgtcattgggtagtcacaagcctcctctcatgagttacacccttcatgaaatcgtagtttggaagcagcccaggaagtcatccactgtatttcctctggatagaataattccctccatgatttactcctcaaatgggattcccaacctgtaatgaagggagctcactagtcttctaggcacctgctacattttatgttaaactctggttatattaagaaactgcaactacaatttgaaatttttataaatttggaaacattccttccaatgattattgctatggacttggattatattttgctgtgatcattgctgtggacatttatcatggaaataataaagagaaccaattaaagttaatgtaattcgaagattaaagtaaaactagtaaaaatgttagatttaaaaccagaatttggaacttaaatggtaattgcaatataaaatattttttcgtctgggtacagtggctcacacctataatcccagcactttgggaggctgaggtgggtggatcacttgaggtcaggagttcgagaacagcctggccaacatggcgaaaccctgtctctactaaaaatacaaaaattagctgcatgaggtggtacacacctgtaattctagctactcaggaggctggggcacaagaaccgcttgaacccagaaggcggaggttgcagtgagccaagatcgcaccactgcactccagcctcggcaacagagcaagactctgtctcagaaaaatatgtatatattttttctagcttggtcagcagaatttcctatcctctttaacatccttttctatccttttggaaatgaaatatattatgatttttgttctgagttagagtcaagtattttattatcattattttaattaactttatttttaaaactatatatttatccagtgattttaaaagaaatagcttgtataaatacacacacagacatgctcacatacacatgcacattttttcccctgcaaattagatcaccttgggaaaaatgccttcaagcctaggacaccattagtggttttaaaactgcatgttaatttcttctcctcaatgagttatcgatatgtctgacaaattcctcctttaaggcaaccctgaaaggaaggtagagtcctgattttaacgcaactacctgaaacagaatttttcatcaaataatcttattttgttattactgtcagcattttatactttagacgttatgtggtaccattctgcagtctctcaaatatcactcattgatgctaattacaacagaagaatgccatacacgtgattgtgaaggtcacccttatcccacatgtggtcatttcaatttcagtgtctacttatcaaattttctgaaagaaactcactgaacaacataggcagtttttcctgtttattatatagttattctaaggtggtaagtgtcacaaagttaacttcaagaggaataacatggtccagtgtgaaacacaaggtacaacattttacaatgaaaccacagcacaaagtaactgaactttcaaaattgggtagttcaatgaaacattttgtcaacccttagctctataaagctctgctgatggacttagttgatggatttaaaaaatatattgctgtgtcaaatgttttaacacaaaatgtttttttttaaagagaatacacatccaatcaactgaaactgtgagcagaaagtatgtaacctctttataaaaacgttatccaaatttacaacattcataatatatttcaaagtaaagagttcttagaaaaaataaactcaattccttgcttactgatgagtatcaactcctcaaaaacacatcacagaaagttaactttcatacttctttgcctataacttttagatatctactaccctggcttcaaaaacattttgtggccatatataatacaaacactcaggtattacatgcatcatttatactatcttggaatttatccataatctactaaaatgaaccacattttaaagacatcatatgtcatgcacccttaaaaattatagtgagggcctctgatttcctcttttttccacatgcataacaggcacaaaattacaaatatttttcaactgacagtacaacacgctatatcaggcaattggtatattgaattcagtgtatctctatttttcacactatgcctctgtgcaatatttcaatcaaagacagttgtcactaacatgcacaaatagagatgctagcaaggttaatgcaaatatgcataaatgagcaaatgtatgcatatatagtaaattcattcgattaacattttcaagtgtgtatatatttatgtagatatatacacacatacagcaagtatattcaaaatttgtcaacagtttagagttttgaaagaacatacagaatcgccttacaggttatctggctttgttattaaacttacttcatatcaaatatactctggattttcttctatttatgttccaacattatacttgacaatctgcaactgtatcaatgtttcatttttttagagtatagtgattggcaaccactacaagccatccatacacacacaatagaaaaaaatcatagtattcgatcttgttaataattgaaaacaaagatatatcaatataaacattaatgttacttatatttaatagttaacacaatattggatttagctgaatttcaatttttttataaatcagtatatctgaatattttgaaccatttgccataccagttgagcaaactgctttttaatttaaacatgccccaactaatatgtcacagagtaacactttattacatgaagattttatgtataattccacaagagccagtaacttataaggctgtatcacaaatactatactttactgttgatggtttatacacatacacagatacttacagaagcatacccacatacacaccaagcctggcaaatttacataaacacccaaacacctgtatagatatatggccacatatgaaaaatttagcagtccaagaattaaaatatgtggaattttcaggaatattattctatatattcattcactttcattaagaaatctgacttgcacacttcattgtttttaagcaaaaaaaagaaagaaagaaagaaagaaagaaagaaagaaaaagagcccaatcatgtatagatcttcagggcatgtgttggaaattccccggctggttatgtagggtatatatatatatagtacatcagcgctggttcaaatggttttagaaaatgttttttgggttcttaatatttagatgagccaatatatgcgcacagggatgtatacagatgagagaacctgacacttcttaaaattctatggcagtacagaaactgtctagatttttccccctgcctagttgattaaacaagacaaaaacacaccatgtggctttcagcactatagtcttttgagttcacactgaacttcatactttatatatttttaacttttgcacttctaaaatgctgaaagcagggaaatattcctaatatctttttctacaatgtctacatctaagaaaaaagtgagtgcaagtgaaaaagtatcgaactttgaactacagcacgatgtcttcagagcgcatttaaggattatcattaggacaaaactgcgtggcttttgctgaagcattccccgctcagtagaacaatttaaaaattcattgccgaattttttttataaagaattctataagtaactcaatcataagtgcctataaatcaccaattctgttccaccaatgaactgaaaacttctgtgtttgttgctaagaaatttttatttctgctttagtttaatagaattatgttttgcataaaaagagatctcaaagactataaatggtgtgctgtttcaatctctgagggactttactttcaaaaagtaaatgatatatatagcccctgaacagtcctttaatagaagtcatatgttcaagagattaaatgctgtggaaagcacttcccttggaactgcttgaatggaaagttggccatgatatctatcggcaattagtacaagtccagtttctttttgccctgtctaaacaaagccatgggctctatatcaattggcaatatctaccacttagaacaaatagcatttattggacctttctagcagtagttgtccataagattgacagtgcagggaagttaaaattattggaatttatttttgttctggaccatctgaccccaccagttttaaagtaactgttccactgctttctttgtatttttggcagtttagtcaaatacatactaatcttttatggacccaactgtattaagtaatgcattttacaaagacataactaaaacagacaccagcataggcaacctcacagatgtttactgtttcagctaaaataaagcagccttttgatctcagcaggagtctctggtcatttctattggaaacagttttaaaacctgaagtctggaacaggtattattatgaactgttctttcaagatggaatgtttcagtttgcagctcttgaataacctgccagagaagtgtctttctctccaacagacagcataatgaggcactaattattatagggctaagttttcaaatgctgttagattgcctggacgttttttcttcttcctcttcttttggttggaatattttattcacttgtaaagtgagatggtaacatacgtaactataaaccagatggtaaaatttgctagttgaacaatttatcagggagataaatcaataacatttaaaacagcgtgtgacaactgaatttctctccatcttgaataaaacatttaaaaattgttttcaagtaaaatttgaaaaaaaaaatcatgtaaaagcctccaaatggcatcaaacatttttaatttatcacctactgagatatgtcaagcctggagaatatcaaaaccatgcttcacaagtcttaaactgttagtgtttgaactagtaaaagtaaatgaccactaggatatggcttaaatacaatagaccatacacattaaattaatttttaacattcagactttaaaatcattattttatgtttaagcaaagacgactataatttttaaaatagaggactagaagagcagaattagtaggttaatgtttaacaatgggttataatcatagacttaattggtttaacacaaaaggagttttgcatatgaaaatttccaaaacaccagcaagattgagaatttttcagagtggagatttggatactctgggcctgatttatacagcaccatttaagtgaattttgcttttcaaatggatttcttggaaaaagtccagacacaattttttttaggtctgtatggaaaaaaaaaaaattcccagctttagtttttacacatttaaaaaattatgtatatgattgtaagaaaaaattatacaatctatagcaatgccattggccaagttcttcatattggcatatagcttaagctaaatttatactgtttctaataaaataactttaaaaaataaaatttacttgacaacaaaaacaaggcaagttcctaaagcctaacttcagagtctttatgagatgtgtcgttgtcataatttttctttttctctcggatgtactaacccacaaaacagtaagtagctttttctactgtctagggagaaaaaaaatctacccaagtatttttattattttgtaataaaagtacctctaaaaaccaagcaattcaaattttaaaaacaatataacctttagaaaaaatatgcctgctagtgccgttttaatatgctttacagaaagtacagaaaaattatatctctatgtctacttataattaagaagaaaactccatctgcagaaattctggctctatattgccacatggttagtgtgttcttgtactcaatattgggtccgtgtatgaaattcatctagagccaggccctgtacaaaaatctcagcattttgtgttcaaactctccccaatcaaatccatgtgggagatatttttaaaaatctctcaatttcaaggttgaacatcacgaaaacaaaatgcatacatatttacttttggatgatttggtcttttatcatttcaaggtatgcaaaactcttttgtgtattttgctgtaagacttttgcttcagaaatgtgaaaccttcacccaatcacaaaccatatacattgctccattgtttcttttacactgagtctcctactgaatccaagtcatccgaagagagggggcggtacaggtcctgcaagatgaagggcagtatagatttgtttactcggctttcttgggtgccctgtggctctcgtgagagcagcactgaatgggcatccccagtttctactattattagaccttttcaagtcaccaacttggattaggaggaaagataataatagagaaaccatctaaataaacaaaatggtgctggtttcgccttattggcaagaaaatgcctcttggtctactcataatcttttgccttccttgatgcccgttgagttgcatggcccctgaggtctgtaaaggtcaactccactactatgtgactaggcaattcttccttgaccatttccttcccattcttggtagaaaaggaacgtgcttacctcacaataaaataatttatcaggaggcccaaatggcgttcagcaaattctggtcccagagcagcaactcaaatgttgtagttgcatgtggcataaaacccaagaaagcattgctttctcaaaatattatgtttggatgacagaaagcgtgtaaaattaacccacctcaccccaaatcccttcccaatgttctttccctgttctccaaccgaccactcactcatcacctcctctctcctttcctacctccccttcctgctactagatctcggttggtagccaggcaaccagctcagatctgcagagagcgtctagagttggcttttctccggttttgtaccacccactcctcacatcatctgactgatcagataatctacaaaagtcagtgatgtgggagtataatggggagcttcattcagcctacataacacaacacatttcttcctgatggattaagaaatgggaccaaaaaaagttcatgagtgggaaaagagtctccaggctctgcttctgtgaccagtcaaatgcctgtagacagcaacttaaataactctgcttcggaaaaataggttacttggtacattgccacgaatatgcttatgaagagaaatgtctggcatgcaggttttcattgtataagagtattccaaaatgtcaaaagaggtaacataaaaatgtgattttaacagaagaaagaaagctgatcaaattttgtaattaatataagtaaaaactagattttcctatttgtaaagaaaccagtcaaatgtctcaaccttccttttgagaaaacagctcatgttcctgtattttaaaatgggggcaaggcgcgcgtgtgtgcatgtgtgtgtatgtgtgtgtgtgtgtgtgtgtgtgtgtgtgttggggtgggggcagtcaactcattttcttggccatgttgctaggcaacacagaaggaaaaaatagaagtagctactgttttccaatctgcagtaaaaagagttaatttattctttgaagtgtcttcttttagcacatgccatctttcacttatttcagtatttcctgcataggagtatagccaatcatttgagaagaccattaaccaaatttgaaacaggatcagtttttagggatcttctaggcccattttaactgggagggattatttgatgcagttgcctatatgccaagatgaaagctcctctggctaaagcatctgggaatgccttcatgcactgacacagcacatggatggggaggttcatttatggcctaaattcaaaagcttggaaatggaaccatcttagaatatacccagtgccctgcctcacaacatgtgctcaataaatgttttcagatggtataaaccctttgtcctcctaaaacaaatgggattgtttttttctctcaagtatggtgtttgcactgatcgtttaaatggtaaaatgaagaatctataagaaagccatatcttataatcattccccaagtgctggaaatgttaattatataagccaatagccacagagctgaatggaaattttctgcctcagttggacaaaatcatactgaagtggaaatacagaaagcagaagaagcgaattctagccccattctgccaagaaagggacatctgagcacagctttacatccctaagctggaggtctcctcaataaataagcaaggagaggagctcccatttgcagcgggaattcccaatcactcttaatgtcaacaactaagcataaacgacaccaataaatctttaatctgagtttaattagctcaaagaataaagacagatttctatgctaggtgtactctccaaagcatacactctaagagacagaatgttctcagaaagagggcccttcctgctctgtatccaatggcggtccctatagattgacgcctcactgggtgatgttcacaagaaaagaatgaccgaccagctcttccttcactcaaggacaggcctttaggagagtaaataaatttggccaattcttggagttgttcacaaatgattccaacaccttaaaattccaaattagactgtggccaagaagaaaccatagtgaaaacactcaaatggaggtagaatggaattattgggctttctatctggaaagaggctccttgttttgttttgtgtttccaatggagacccagaaaagataataggcttatctaagataccacggccatttagtggacaagctggcgtcaaatcccaggcttcatcaaacgctcaaaacaagttccacctgatgccaggtgaatcagtgaagaaagataaccaaacttgatatttggtgcaacaggctccaaaggagatgggaaccaactgaatctccccgccccgcactcttagacgtctggcagcctaaagacacaacctgtgcagaaatcttgaagagagggccttccatcctggatgacacgtaattttgtggaactcagaagttttgttttaaaacacataataaaagaaactaaactcaagaatcttgtgtttgagtgcagtagactgcaaggagttctcgcttattaaagtgttcagtgagcaccatcatgaaacctcctaggagcgtacattccccccaccttgcgtctgaaatcaggaccataaagggccttccgtttttggcattgtacctccccctttgcccccttcccactacttttatttttgccttggtattactggaaaagacaaacagtacaggttgtgacaggataagaacagtagtctctccatcctgaaagaagcactaaccctcaccctcttccttagggtggagaagctaacagtttccagtaactttttcactgtggtctccaagctcagccaaattctccataaatgcaagtagtgatgaaaaggtgctcaatgtgggtttcatccacaaaagcacgtgtcataggttcccatcccctacctcatggaccctctgctgctctggggccccatccataccataagcaattttccaccagggccctcccctccattcacagcacttcttctttcccttaatggtgatatctaatcaaactcatcacaactaagaaggcttacaaactagtgctaataaagcctgtgcattcagaacagaaagaggagagtatgtaaaagtgaagtagcaaaggtgcattcttctcagagttaagatttggacaaggttacagagaagctaaaagccctgagttctagctaaaccaaagcaataagcaacccctcattggtcacctcctgttctagcttagatatcgcctagagacgagcagcacgatttgctggcacctgtacctgtctgcaccaaggctgagacaggtctgaaacaagcagcttgcttatttccttaccctctgcttccgcaggcttcctgggctggtgggtgatgggcttggcgacttgcctgagcgcggagtagagagctgactaccaggggttccattaactagaaatacaaagaatcacacacagagaaaaatggcacgttaaataattttcatgacaaatcatcttctgcaagaaataaacaattatatagagagccatctactagaactctagacacccttccatatgtacactgaggaacagctttggggaagtaaccttcagagagtcacagttttgtaaatcctgtgtttcatagagcagcaggttacagaattattttttaagatgtacctttcacaactttcctgatgaatgtattaatgatgtctttaactgtgccagcagggactttaggaatgtatggtcctgagacattttcaatgagattaatccttaactcttcagtttagctacctagtactacccagcaggaataaatataagcacagatcaccagtgacattccagtgacctgataaatagatcactgtatttgtataattaataactcacttctagaaaaatgtcctgcatccacctgtgtcttgtccatccccctaggctgattgtgatggacctgccttgaacaggacagtcattggccacagacgctgagaaactcctcacagtttctctttgctgcctttgaaaagaaaaactgctaacaagttcaaatcactggaattctacccagttctcaagagttttatgcacattttcactaaactgaactaaagccacagaactcaagtaagccattcttttctctaagtaacatcatctctaacaacagatgaaacacttaaagacatggttttataaagatgtatcaggtcacctctattttacctgtaaaaatggcattacagccccacagtcagtgaagtagaattaaccaggagacacatagattcttgagggtgcaaaataaatgctttccacaagggagagcagcaatgcatttcacttaccttctatgagttctaacatggacacagtcttagtgttggacctgaataccaacggcggaatcccgtctcagcactaagccaagcacccgcggaaatgggaatcggttggatgagtttaaggatggctaaggctgctcccagagcaggctgaatgagatgcaggattcatcagcagatgccttttctgcgtaaagctgacgtctcccaagcagcagtgggaggtgcaggttctgtcttaggctacatcaaaggtgtcaattaagcctcttgccaacagcaacccccatcccgacaccactcccttccggaagccccagtgctgtcagtactttgcactgaatcataatgaagtggccctgggggcaagagatccagtgactcatctgaaaatcgaaatgacaataactcttctaaagcctggtgactaccaggtaatcaggaaaccctcacacaattcagtggcaaggtaggatgtttattgatttttcgcacttgatgttttcccaaaaacttacaaccctggaaagtgggaagctccttgttttgtcatctcctccaaagaccttaaaaaatgtcacataccccatgctgcattaatttgtagttttgcttttgaaatgtatttggcaactcctaaaaatagaaacctaaaaagctatgaatttttgtttgtttgtttgcagagagagtgaactggaaagctgagaatgctttaatttgcttgcatgccaccatcctgtctttgctgagtgaacttcacgctcggacctcatcacattagacttcctcagccagtagcctctaaggaaggggctcagaaatagaaaaggattaaagacaagggcagaagcagagcctataactagtaagaaagggatgccttactggttggctggagaacacattttgtgaatataatattttctttacccacccgcattctactgcacatctttatgtcatacgtaaaggctacatagattggagggaaaaaatgagcaaatagggaagcaaacacagtgttaacacttttcactttgagactctgatcttatccagctaatggaaaatgaagaaaaagagacaaagggctcacaagaaaacagtctcaggaataccttgctttaaaaagcaaaacaaaacaataaaagcctgtaagtatttagtaagtatccattgtatgtgtatttttaaggcattttttgaaagacatttatttttattgaaggcatttttatgcaccagtcaatgcacttagaccttttatatatgaacatatatgcatctgtgtgcatcagtatgtatatatattacatcatttaactcacagaataactctataagattggcagcatcatttccacccattttacaggtgaggaaattgaggcttacagatgatgagtcatttcacaagcaaatatggagcagagcctaaaatctaacctaggcagttcaaaacctgcagtcttactactaccttgccttactgtgccagccctttaacctacaggtaaaccagagaactaagctagaattacaataaagtattttgagaggggaagtgaggcaggatagttagtcaaggaagtgaccatgttctcgggatgcagcattggtggtgacctcacagccaacacaataagccttggcattcacatcataaatgagctcatttaagcaaagctatcttcaggagggactgtcccttctctagggcatgtgcattttgattttaattgtcatcaaactgaccctttgctcatttatagtaaaaaacacacccctgggtggagatttaagatgctaatgagacatgtgatatatgaacacaaacatacagctacagtgcatgtgcacccagaggaccacccagaacatgcttactagcaacacctcttcccaactccttatgaattatcatgtaagactcccacaaagggggtttctctagcaataatcaacactgcctcacccttgcaagcagcccaccctgaactctctctctcagggtatactgtctattctgcatctaactttcaaaatactcttttccttttgcagtgaatgactctctgccgcatctcctttgctgtgtgtcttttgtttaaattcttttaaactaagaagacaagaaccgaggtatcacaacagccattaacagaagtattgggtgttgcaattggaatcctaataaccaacagtgagagttggcctacgcccttcacagagggcagtggatacagaagttagcctggtgaagcaaggggggcacaatgaaggaaaagtgtcctcagcccagggatctcctgtttcagggctggatacgagaaaggaggccagtgtggtacactgaagagacttaaataactaagtaaagcaagtatgtggggttggaggcggaggaatgtcaggaatgagatggaggcaggggccgcatagtgagtagtgctttaaaattcatgttagggagtttggtttttatccaaagggcaatgagaagaaaaacaaaaacaaaaacaaagattttaagcaggcgccacaggatcaggcttgcatttgaaaatgctctccagctcttgccctgtcaagaatggattagagggaaacaatactgggtgcaaggagaatgtcaaggtaggagagagtggggcacatttaagggtcctatggtagagatgctgacgtggctgatctagggtagtgtcatggggtggaggtaaacggaaacgttccagagaaatgtaagaggtaaaaactatagaacctggtaattgattggctgtagaagattaaggccaaaagggagcatgtttgcaaggacagagagtttggacactttgaacggaagcaccttaggtaacatcagttctgccatgtaagttggtgcaatgttttctgttttagatgaagaaacatgtttagtcaggtaacttgtccaaagacaaacagctggaagatggcagagttaaagctggatttcatttaggtcttactcaaaaaactttgcacttttcccatgagtggctggtcctggcacctcagggcatgtccagaaccctcctagcatctgcagggctgaggatgcctaggcttctctctctaccaccgggacactcggatctgcctcctttaggcaaggttattgcaatggtaattgtggtttttgccattaaaagtaaagcaaaaactgcaattacttttgcaccaacctaataaaaccactgggctcagtgcttctatttgcatcgccatctctagaaaaatgaaactcaagtgccagacaagtcatttacaatcaaatgcttttggaacacaacttgtctgaacattgggaacagcatgtactcttagggtcagagctctgttcagactcttcctcttggccatacagaagagcattagcaacttcttaaaatggttcttgacatccagaaagcattacacaccttcttgttgaatcactgctgggataaataattttctttcataaataagtttgacacatgtactgagtacacttggtttttactctgtaatgccagaagtttctaagtgccataacaaggctttgtgacttatttaatagaacttattaaaattcaacttaaaatggcattattttttcagaggcccttattacacaattctttatcttgaatgggaacaattaaactaacacggttgttgttaaacagccaagcagggctgaacaattaattatttcaatctgaatccactaaactctgaattagtaaagaactcattagaaccgctgcctttacccagttctggtctcctttgcttttatctgtataggtacattttcttattttaaaaaataggaaatgtcatcctttgctgtgcttgttacccttgaatgagaagtgctcaacttcaaaatggatcattcactgataccatgatgaccaattaacatcactggccaccaaagagctgtggaagaaatctcactgcagagctgacttctatccctcccgacggtacatgaccctcctttatttcgactcagctgtcacctaagcctgtcagggatccaacagcatataccggtcacagcgcattgttgaataatactcctcaggaagtgtgcagatccaccttttccttcatcatttcagacaggtgaaccaactcttcttcactaactggagccacgagtccagggccctagatatcaacctatcagcacacgtagtgtacacttagtacatgctagattcttattgctccctgtccccaagatgcttatgattaaacatcaaagttactttaaaaaatctagaatttggaaatacttggcttaatttacaaattcattgcccttttaaatgactttccacgcatatgtaggttaacacttctttttgcagtcgcgttcctaaaagtctcagacaccaagtgaaagctgaatgttagtaagtgtctcaaattggttctgaagttagagaaatctccaagcgagactatctaattaaaagatgtgcaactttttggacgtgaaatccaccttactgtttccctgtcttcttttagcacttaaggaggctcatttatttctggtgctgcacttgtcaagatttggggagagaatgtgtttgcatatatgtgtgtgtccttgggtttgggggtggcgattcaggcacgctgccagggagatctggcttcctgccttagactctcctttactccctaatcatggtgtaggctgttcattccctaaaatctctttctcagcttttgttccttgcttgccacattattgagaaggaaaaaaaatgcagggggtggggggtgcatagggaatcagttgagaccaagagaaaagagacaactacctaacagagggaagaagacgtactttttccctaattttagcttcttgggtgctcacctcataggtgaggtggagctctgattttctccatgtctgtttcctcttcttgaactgagacaatgggtccaattcaaagaaaccatctactgagaataatgggaaggaggggccccaggaacagaggagagggagacagggacacagctctgtgaattaattttttaaataaatacttacaaaggctccaaacctcaggaaatttaggcaacagctcctagtgtttctcaattcattcatgtggtcaacatttacccagtagttaccatgaactcacagtcactgtagaatgcacaaagaacccctgctctcagactttacaactgagcaaggtggtgcaacgtgtcatctgtgaatcagctgctgcagtactgcagggctggggaagaccctggacagcgaggtgatccgggaaagtggcagaggtctgcagggccaaattgggtgagtgggctttagacagctgaagagacagaggaagacattctagctaggccaagtgagaggaataaagggatgaggtggaaaagcccaagctggggacaatttaaatttgtttctaggatggagcatgggtccagagaagaaatgggggacatgagtggaaaggaagatgtccttcacttgagaacaagttcagactttatttggcacacaacaggtgatggcagcaggttggacattggtgcccagggcagatgtaagataaagtgggaggacaccagccagcaatggcatcaccatagggagaatggtgacccactgagtgtggacagggtggagagaaaagagttggtgatgatttggggtacaagaaaaaaaatttaattaaacaataaaaaaagaccaactagagtcctgtgatgtaaaattaggaaatttttggatctgatccctatcagctgggatccaagaacaggctatggtcatgataggggaattggggaccacaagcaccaagggtcagggtggatgagggtcctggggttgatccctaccaaccaatcgctgcaggacagctcccgctagagtaaagcctggagccagcctgggaaaggacccacggtgaccaccaaaaatcacactcccagaccaggtccccctgccatctggtattgcccattccttcataggccacagtggtgtcctcactgctgaatcctacgatccccattcagttctcatgctacctgacatctcaacatcaagcatttctgccccgtccttcatctcaaaactttctgcccctttgacttctgtccctgtactcttactgttcttccctgcttctgctgattgctcttagaaatgcagacttctggccaggcacagtggctcacgcctgaaatcccagcactttgggaggccgaggcaggtagatcacgaggtcagaagatcgagaccaccctggataacatagtgaaaccccgtctctactaaaaaaaaaaaatacaaaaaattagccaggcgtggtggcgggcacctgtagtcccagctactcgaaggctgaggcgggagaatggcatgaacccaggaggcggagctagcagtgagcggagattgcgcccaccgcactccagcctgggtgacagagcgagactccgtctcaaaaaaaaaaaaaaaaaaaaaaaagaaatgcagacttccctcccccatgcatggttccattttcatctttacaaatctcttgttgaggcagcggggaggtaccttatgtttctattattcaaatcactacaatataccagggtctcccaaatatatattgttagcgcagatctcctgacttagaacagttatttatttccaattgcttacagacatttccaaatcgcctcacactccacatgtctaaaacgaaactcattccttacctctcctcatccaacaaacctgcttcctatctctgatccctctctcttcttctagcctcacatccagttaaatttctggtttcatttccctttgaggtctcccccagctctttcggttctgtcttgacaatttcattccaggatgactacaatggcctcatagagccttcctggcccttggcctttcatgtgtagcaattttttccaccgccatgccactgtttccaaaactcaactgcgatctttcatggcactgtgaaaaatcccctttcacttcataatacctacaatctacagcacaaacatacttccacgaccctgtgcaatttgaccacaaccaacggggctaccaccatctttccaactctttcttagaattctatcctgcatttttattgaacaagcaactattccctaactatgccatatagtttaatgtctttgtgccttagctcacactgggagggaatgtcctcctggcccttttttacatccaaatttataaatccttttctcttggaagagctttctgaccctattaatgagatctaacctgtttcctctaggtcatcacagcacttattacactattatagttacatgcatacagtcaagtaccacaaaacaatgttttggtcaacaagggaccatatatccgatggtggtcccacaagattacaattctgtattttcactgcaccttttctatgtttacacctgttgagatgtgcaaatgcttatcattgcttacaattgctaggatattcagtacaataacatactgtataggtttatagcctaggagcaataggccataccacatagccatgtgtgtagcaggctataccatctaggtttgtgtatgtacactctaggatgttcacacaatggcaaaattgcctaataacacatttcttggaacacatccccatcatcaagcaacacatggctgtatatgtttctctccctactataatataagcaacttgaaggcaaggactgtggtttaatcatctttgcacccttgggacctaatgcatgtctggaacacagtagatactcaggaaatatttaattaacctggggcattaactgtgagaaatttatacaagcagttgatgtaggttgctgcccccaagtagacagtaagtcaagataatggttaaaggctttgaagagtatctttggaggttctgctggggtgaacactaggaagaattggtgggtgcagagaaaggagaaatggaaggagggatgagccttacatgcagccagaaattccaaagacacaagggatgaatcaccaacctctcgattttcttgatgcattttgttctcaacaatttccttggagctccaaagcaaaaaagattctccatagactgtataaggctgaattctctacactaaaggaaaagactgaactcaaaattaatagctggcaatctgcctttgaaggtgtttgatataaatcaaaagaatttgacaaactggactagtagtgagctgattagaattctcttcacttcctcagctttgattcttatctgcatatgttgcataaaatatttttatagaactgtaaaaaagtaaaatttaaatagcatgaataaaaagacttcaggatttctggagtaacatagaagtaagttttaaggctgggtgttcagaatggtgcttcgtcatggtagatgctcattaactgagccatttgggttttccttctttcaaatgtttgcccttgcatctccagcacccaacgttgccggtccactatagattctcaatgcatactgaatgaatgaatggttgttgccatgaatgtttctactctataagcttctgaagggcaggaaagtacattatctcatattggaattgaaaggtgtgaggcactcattgggcctcagttatgtctgctaagggttccacagacagagattctaaatacagggtatcattctatgataaaaagttggctatctggccgggcgcggtggctcacgcctgtaatcccagcactttgggaggccgaggcgggcggatcacgaggtcaggagatcgagaccatcccggctaaaacggtgaaaccccgtctctactaaaaatacaaaaaattagccgggcgtagtggcgggcgcctgtagtcccagctacttgggaggctgaggcaggagaatggcgtgaacccgggaggcggagcttgcagtgagccgagatcccgccactgcactccagcctgggcgacagagcgagactccgtctcaaaaaaaaaaaaaaaaaaaaaaaaaagttggctatctaaatggaaataaaaactgtaaaacaaacaaaaaaactccatttttcttctctcttttttttttttttttggaatggggtctcactctggcatccaagctggagtgcagtggtgtgatcatggctgactttagcctcaaactcctaggctcaagacttcatgtcacctcagcctcccaagtagctgggaccacaggtgtgcaccattacacccagctagtttttaaatttcttgtagacacaggtcttggtatgttgcctaggttggtctcaaactcctgagctcaaccagtcctcctgcctaggcctcccaaagtgttgggattaaaggtataagccaccatgcctggccccagagctttcccaaatccaagaaaagatcaaaattttgaagtttgtaagttttaaggaggactgcagctgtgaaacttcaagataaacacagttttcttgtaagattaagaaaacaatataaagccaactgaaattttatcagtctttattaaaaccaaagtgatgcatattttattcctatttttagagttattttattataatttccctgtgtagataaaaaaaattgcttaaaagaattttacttttgccactgcactccaacttgggtgacagagtgagaccctgtctcaaaaataaaattaatgaattttacttttaacttatacattttactagatctgtgttccaaatatatacacatgtatgaagaatcaaacccatatgaaactccttattccttatgatgctcttacagattctcatttctttaagaagcagctagaagtcattttccaatttcttagtgattcatcctccagtgtctcagcacgcaatttgtctggaggctctttactcttttcatgtgttattaaggcttctggtttctctttgctagctctgtttgccttctttcagccttttctgttatggagactaatcataattcaacaggtatgtgaatcatgttatctgtgaggccttgactcctatgcttcttgagaataggggctttctttcatctctgcatcattagtgcctagcaaatgcctgacactagttggtctgtaactgatagttctgaaagtgtaaatgaacacctaacattaataaatcactttgaacctcttttagtgctatgaagagaaatgggtaagggacaaagggaagacttacagaggattcccattcttgttctaatgctgacttacaagggaggtttctgtccagcaatactatacatcaggaagttggggtaaatcattcacctcctggaacgctggtgccaagggactaatacttaggcttatgttgcaaggtgctgtgatgctgtgaattgcaatctcaaattaggcactagattaattgtttcctggagatcaaaactctagtaagtggaggtgaagaaataggtatcaaggactgccagccttgtgtgtctagagtaccagaagtccccggtgccagccccgagttgccattctgaactctgggactcagagcaaagcagttatcccagccctgcctctgtgtccttatttctacaaacagagataataataacttgccttacttgcctgctgttaggaaattaataggaggatcaaaaaagattgaagaaataaaagccgtatgtaaactataatgtttcaggtaaatataagttaaccatgttatattcatagcagcatagcccgaaaattgtgcagatcttaactttataatacgctccaatttctgtataatataggaaactgaatactggaagtagaaatttaaacactgaagtagaaatcattataaactttgggttaatgttttgggggaaaacaaagactctttttttttttttttttgagacagggtctcactcagtcatccaggctggagtgcagttgtgcaatctcgactcactgcaacctctgcctcccagtgtcaagccatcctgtatagctgggaccacaggaaacaaagcaaccatcattccaggctaatttttgtatttttttttttttttttagagaccaggtttcaccagcctgccttggcctcccaaagtgctgggattacaggcatgagccaccacacccagtctaaagatgctttaacattaaaaaatcaggtggtagttgggtttggggcaataccaatgtttatggagtatttaagtaaaattcatgtttgagtccatatgattaatgaaaaacactaaacaggctattttaagaaaatgtgatgtaatccatatagagacaattcaacgtgcctttccactagttccaagagctatagttgagtagggacaggagacctgggccagagcagtggaggggccctgagagaggggtttccctgacatccagcagctacacttgcctctaggagaactggcaacactgccgaattccttaacctctgggcccggttccagggaaaggaggtggtcctgaggtcactggcacaatccacacatttgtgactgggagttgactgccctgtgaaactctctaaattggtaccatccaaaggaaagtggtaacaagtcacttttggtagcaagtcagaatcaagagatagtcagtgcatatagtaatctcttatataatcagaaaatgattgcatgttatctcttccaggtcaaaatgcagcaagttgaaaattttatatacacaaaaagctcacattaaacaaaatatgatcagtgttatataattaactttgacctagaagttaaagtgctaatttttcaagaacatattaattttagaatgaatttggactctactttctttatgaaaatgatactacttggtatgacttacctatcacaaattccaagttagtgctggtcaattcaaccaggtttcaactagagttgaaaaggacttcaaggaaaaaatagaatgtggaaatgcttgtttggagcaacctgttgattttgaggcaatgtgtcctacccattttaaacttctaaaaggaataattacaaatgttggcagtgacatacaagtacatttaatatattcgcctatcttcttgagtttccaaaattacttttcagaaatgaatataaattcttacaatgctgaatagtgattacattaccagttaattataaaatgaaattattgcctatatgcataattatatttttaagattagactcatcagtccattctttaacatgtacgcaagaatctgatccattccccatctttattgacttaaagggagaagaaagaaagaaagaaagaaagagagagggagagagagagagaaagagagaaagaaagaaaaagaaagaaagaaagaaagaaagaaagaaagaaagaaagaaagaaagaaagaaagagaaaaagaaagaccctaaaccctggagtatctagagtatctaacaacctacagctcttttttttttttttttttgagatggagtcttgctctgttgcccaggctggagtgcagtggcaccatctccgctcactgcaagctccacctcccgggttcacgccattctcctgcctcagcctcccgagtagctgggactacaggcgcctgccaccacgcccggctaattttttgtatttttagtagagacaggtttcactgtgttagccaggatggtctcgatctcctgacctcatgatccgcctgcctcagcctcccaaagtgctgggattacaggcgtgagccaccgcacctggcccaacctacagctcttaacaacaaaactgctaaaaacaatgacaataaaaagttaaaagctgcagtgcatattgattttcttggaatatctgtaatataaaacacataagaatttggctaattacccattattagatgcatctgccccacacttgtttttttattcatcttatatactgagaggaagaagataggaaaggttaagtaaaatttaagtcaaagttggtttggatggagaactaattttgttttttaatattgatgatttttaatagtattgatactattcattaattcattaatatactaattgatacggtttcattaatataggctctcattctctttcacatccttctgtgattgcattaagtagccaaaattttaggggcaataagctggctaggcttatgactttgttctcctttattgctccatgggagttcaccctatagcccagatttatttatttctttattatttgttttgagacagtgtcttgctctgtcatccaggctggagtgcagtggcgtgatttctgctcactgcaacctctgcccctcaaggttcaagcgattctcctgcctcagcctcctgagtagctaggattacaggcacccaccaccatgcctggctaatttttgtatttttagtagagatggggtttcactacattggccaggctggtctcaaactcctgacctcaagtgatccacccccatcaacctcccaaagttctgggattacaggtatgagccaccaggcccgggcctatagcccagatttaatcagagaaagtgagaaatgttttttagttaagactgaacatcctccacagagctcaatattaacctgtcagctggacaagctcagttcttccaggggagttttccatgcagcaattccaggatcactctgtcattctgtggaggtcctcttctctgtgtgtgggtggtatctcccttgaagggagagactttccctgacatcctggggaagggatcatcttcagaaagaaattctcttttctcccaggtgactgactctctgaggccaggtcattgcaaggagggagaaaaggaagttggcatctggtactctcctttgttcattgctcttttggtctacacatcaaggtatctaaaaggtctgctcttggattgcaaggacactgatggacattgctacttggaggcaaacagggaggtagaaaggaagtcatctctgtcatgccagtaaatgaagatgaacaagtcatatctttccctccagattatccagagtcaaatgttttctgcatttacttcctttctgttttccaaaaccccctgcttctcaaagtgtgcattggaatcagctggagggcttgggaaattccaatttgctgggctctagctccagagtttctgattcagtggttctggagagggagctcagggctttgtagttctaacaagtgctcaggtgatggtgatgctgctagtttgagaaccactgccctcacctactgtttctcaaaatgtggaccacagactacccgatcctaatcacctggagtacttgctgaaacacaggtttaggtccttagtcagaatctcagggtgtgggggttcaggatgacaaactttgccaagttcccaagtgactctcatgagctctaagctttgagtctactgtctcatcctttagcaatgcctcattttagggctctatcctatctacatgagcagtgtcatactaagggaggagttctcagctcacctttaaactacagaggcaaacaagatgcatctcaagtgccagcgatgctctgaaacgtatttcctgactggctatgatgcaggccatgctgtgggaaggaggcattggcagcccattgatgccaccctaggttgagagtcagaggggaaggtggtctttggagatctgtctagagaatagcagtaattggtaaaactccaaggggaaggagactcttagagaatcaaggagggctgggtggtctagctggcccctgacctataatgatccaccctattgagagttccttcttaggcagcctcagccgagagctcttttcacactccccctagcccatgctgttgagtaaaagaaggcccccaagtaggccccagaggtctttattcttatttataagagcttcttgtcttcatgaaatcaggtaacaatcactttgacatttgcatcgtttaataattcccaatacaatttgtgtcatttaataaataattccctttaataacaatagagacccttcacctgagacaaacaaagaagacactttctaactgacttcatgtcagttttaagaccaaaaaggagaaggtagggttgaggtgctcatcttgtgcatacacagcctctccaacaccagcactagaatccactgagagacaggctcaggccaaggtcactgcagcaatccctgctccaccctctcaatctcactacctttagctccagagccatgaaaggaaactgaggccagagccaaaagtgtgtttaataaaggttcagcgaatacaaatgggaaactcttcataggccagtctcaggtagaataaatgctttaacagagacttccagaatctgaaagattaactttggtggtagaaaggatacaagatgataacgttcttctatttgtgggcaaatctgggtttcctgagtcctcactaagtacattttttgaagctcaatgctttttcttgcagccaatatgctagactccagcaaatctgttcaaccgctctaagatgttctaaaattataaaccggaacctacactcgcttaaaaacctcacactctaggcttcacacaccctctgctcatcctgtgtcaggaacaaggcaatttcttcaaaatcccctctgctgctttacctgagctggtggaggcaggggacttgctacgcctggacggtcctgggctcttggtggtgctcctgcgggatgatgaagctattttggtgtaagaagtggactttaccactcgacattctggggaaagaacaaaaaccacacatcattatggggtaatggcacacacacaccaactcaaaatgcacaataaacctggaagtagaaatatatgaccatcctcagtcacatctacttcccaccagctgggttcttgtctatgtcaatgaaaccaagaaaacaaagaggaaggacagggtgggcttcttagacatggaagtaaataatacttcaatccccctaggttacactccttacaataatattttggctagattgggagtgatataggctaataaagaggtgttttgttgggtttctctctactcactccttgagttatctgtatatgtgggtctcttgggataaactgttgttgcttccaaggaaaatgttagaagaaaggtcaacctcataaaccaagaaatgtggtggtggaagattccgcccaccacaacaggaccaagtttattgccatgggtcctcacggagatagttgtgggtctttatgatatgtgggagatgacagcatttgcttggaagaggtaaaactggtgaagaggtggtatttccctgctgcaagggcatcctgccagcctgtgccaccacatgaagctgccacagattttatactgtgtctgtgaaatggtttgtggcttgaggataagaaacaacttcactttcattagatttaaattctcagtgttcatgtccattatattcaatgctgaacatcttaaatggcagagagttttctatttctctcttagtgagctcccttgaccaattatgatgctgtacaaacccacatatcttgttcttaagaaactgcttctaataattaacaaaaaaatatatgcttgtaaggataatcaatgttcactgtagatggaaaaatataaggcatattttaaaacacccccaataacccatgatcaaatgatactttatttttggaggggggtatagaaacttctagaatttttgtctatgcatttatatatttcagcattaggatttgttcatatgtgttgatctgttaccaacccttttcacaatacagtatcttgtgagcattttcactctgttatttaatggctgttgagcatctgactgcatggaataccataatttacttaaccgaattccaactattgaatatctaacttgctttcagtatttcactgttataaataattactcaatgacacctttgtaaatgagtgtgcagttatcctatcactcccttaggacagatttagtccctggcacttgacatttagtttctagtagccagaaaccaagggcacactgtgggtgctcaaaaatatttaccgacccttttctttttaaaaaattataaattcaaaatttaaaaaatagcaatagctatttgttctttccccttcaatatcactacctttgtgatattgttctttccccttcaatatcactaacatttttaatagtgtaaggaccttaccatagcttttctaagcttatataaacacatatatacatagccaggtttttgtttgctttttataaaaatggcaagatagcgacatattttatacattttccatacttatatattataatcatctttcttggtcaacccatagcaatcaaaactgtttttctaaaccctgcatcatattttgtaatatgtttatatcacaacttattcaatcattcccctattgatagaaagtcaggtcactccttatattctaatttcttctttatattttccaacttaaataaaaaattttagagacaagccgggccaacatggtgaaaccctgcctctactaaaaatacaaaaattagccgggtatggtggtgggcgccagtaatcccagctactcgggaggctaaggcaggagaatcacttgaatctggaaggcagaggctgcagtgagccaagatcccaaaaacataaataaataaaaataaaaaaattaaaattaaaaaatttgctgaacaaagtggatttggtgagttcaaagagaacttcttaaaagctctgaatgatgccctccagaaagtccaacaaattgtacttttttttttcccctcaagacagagtctcgctcttgttgcccaggctggagtgcagtggcgtgatctcgggtcactgcaacctccacctcccgagttcaagagattctcctgcctcagcctcccaagtagctgggactacagggtgcccaccaccatgcctggctaatttttgtatttttagtagaggtggggtttcatcatgttggccaggctggtttcaaactcctgacctcaaatgatccacccacctcagcctcccaaagtgctgggattacaggtgtgagccaccatgcccggcctcaaattgtacttttatagacaatgagtggtcatttgctgggtccctcactgaggttaggtattacattttcaaaaaatctttgccaatttctaaacaaatattggatttcctttcttgaaatctgaattggtttgattgccagtaaagttgtacatttttcccacacgcatattagccatttggatttcttcttttgcaattacttatttatgtcctactttctcttattggtttgtaagagtgcattctatatgaaagtttaacacttagtctatcatgttataaatatttatcattgtaggtagttgttgaaatatgttagcttttcaaatgtggtgaacctttttagtatagtagttttaaattaaactactttaacttttccattatatattttaaatcccattttacgctttagtaacaaagaactcataatcattccagatctcattctgatgcctgacttcaaaatttttcttccctatccacgcaatttctaattttctaaattcaaaacatgtttctctctcttatatattctgaattgctttatataaacatcgtttcctatttttttctaacatctaaactaacaaagtagtttaaattgtttagtaagaaaagatgtgagtttatatgaaatacagatgttataagactacaaacaggagataagtcatggaggagagtgtgtcctagagagtctcatgaattgaaatgggggaaaagaagagggaatattaaaaaagaagaggaagcaaattctgccttgtgatatttcttcttcctccacttgttttcatagcccaaagcaaagagaaatgaatcaaggcattacagagcctgcccagtcttccccaacagttacttgggccactgtcactgttctggcctgcccagtgaccctgcaagatatttctgttttttaaaaaaaagaaaaaaatctatacatacaggaatattgacaaaaattaaaagataggagtaaccaagaaacaacattaacaacgtcagaaaatacaataggaaaaccaggaccgttcccatgggacaataacgcccaaggtgtccgtggagattttgattcgcaaaacagagctttggaacgtgccaaggagatctcagattagctcatggctctgaccatgcaactgacaacacatcctggagtttgtcctagctttggcctctgcctagccttttggaagtacactagcaaccaaactggaatgccacaatgtcgccggcccattggcatgcttcctcgtacatttttatcacgtggccactacgtgccaagcatcgagagctgcaggcatgatggagaacaatacaaagttttggaactcaaaacctttaccatctggtaatggtgcatagagtcttttcaccagtgaggcctctttttgctaatttttatttcatggacctcatgtttgaaaaatgttagtttatgcaacacattgttgttaagtaacattcaattttctcattttaaataaaaatcaagatgatcatgagggcagatgaccagaactttttgtcccaggttatgaacattcagaggtcacataaatttaaaacaatgattttaaaagctcagcatctagttagcaagaatgaatagttaagatagaaagctaacagatggtacacattgttcataatatccatctgtgatccacaatgtgaatttaaaagttggttttagggttcatggcatgctgtttggcacaggtgccagagttgctagctgtggctataactaccaaccagcaatccaggacaccataatagaaccaatcttaccacactcagttgacacttttccaagtaccaaaaagaaacttggtatttctgtgaggcagctcttcttatcagaagaaatgtaggtatttcattaagtttttgaaatattggaaaaacttgtggcctcttatcatgcttccaaagcttcccttgcttctcctgaactgagttctcaccatattattaatcagtcagaattattcatttattagtccgtctccccactcccatactccattggatactaactagtccctgccatattaaaaagcatgaagtagctgctcgataaatatcggcccaaattgctgctgatcctgttactacttgtgtgaactcttggtattcactgaactaacccaaactctcattgtacacccaagaaaactgagtctcagagagatgaaatgacttgcatcagaacccaactctcttgggttggtggcttcctcactacccccagtatctgatgctgtggcctaagcaagctgttccatggtgacgaaagcctgggaaatgtctatcggtgtccatggtcaggggcagacaaatgggtgatggtgcatcaggggaagaactgcaagcaactgttctcatatcaacattaaataagaaattcaagatatgaaagctacctgtctatcaaatgtttagtatatcagaaaaaaagagaaacaaactgtctttcagaaatggagttataatgaagtaatagcttggaggatcatggagtctgaaagataattacaaatatttcaactcttggaccacttgccttaaggataagagtgatacttcatgagtcatattgtggattagaataattccaaaggcttgggttgaataacaaaaacagaaacaacaacaacagatttatagtaactacgttttctaaaatgggtcaacataaatccagctgaagaatattgcagtgccaagccgtaaattataaaaaacaaaaacaaaaactccaaccatctttccaaataaagtttagattttccatgttttaattaatttaaataggaattgtattttataatggtgaaaatgcagtgaggaacaaatgctgcatggcttcagagagaatgccaaaatctacatcagctgataaccacaattttgaaacattgtgaataatatgacctaaatggccagtaatgtagaaaacctttttgttgacacaaaggacattttcatagcctcaggcaaggaagaaagcagtgccttccattccccctctcacatgggggcatttgcctttgggggccatcacttctttactctgatgtttcttggcacccctatatttcactgaccaattctctaagaggactgtatttcctttggtggtggagaaactggatgacccagactctccttaagaaagatgacaccgaaggactgtaggtaagccacttgaaggaagctaacagatggtaatttctcttgctcctaaagattgcagcctacccaaaggacaggaaatcagaccaaactcatgaactggttctctgatgactgaacctcccacagcaggcaagcaagtaagcaacattgaattaaatctctgctctatttagtccctacattcatctgaggtgaaaagtatcattccccacacgatctatacaaatgttttggggatttatagaagttaaatgtttctcaccttcacccaggacatgaactcctgaaatgggcattctttgatggacagatttagagagacagcccagatggtgatgtataaggaggaggtggaacatattctttggccacattcccggtggcaggagaacctccacttagaaagatcctccccccactcagaaacagttggtaggtaggctgaagtgttatagaaggtgctgaagaatagaaacggttgcagaattccaccaaagacaccagtggctcacctgagctcacatagtgatcatgcattcaaaggggcctacttagaccttctggagaatcttgaacaaggcataggtgaagtcccttgagtgtctagacagccttggtgacatgctgcatgttggctagggaatactctttgaacaagaaatggttttacttttctagtctcttttttgaaaccaaccagcataaaagcactcttaggcagaggcctcttaatatatctcaactctaaattcagttttctgaattgttcaggaaatggacaagttcatctagaagaaaccatcataagcagtagatgctttgtgctttctaccataccctgattacaaaggcaagcttcctcttaatttggcaaaggtacaaagcctgtaaatggaataatattcctctctgttgctatatgcaaaagagagtgaggaagcacattcagttccagaggcattttataaaaatggcacaaagtcaatgacaaaaagaacttgcaattctgattctccaattctccaataagttgcccctacatgttcacttccctccccttgggaggcgccctcctagaatatcaaggctgtcaatggttaatgagtcaactctctccttaactcaggaatattctctcctcctgtctccattccaactaagtggtggtccagcttccttctgagcacccccagtgcctgggagattcaccacctcctgcctcatggttttgaatctcagtctccatcctcagtctccagcttgtctgcctggttgagctgaacaaagccatcctggtataatggacaactaaaatttactttctatagaaatgttatgattttcatacttcgcagcagcattacaggaaaatccacatgtaggcttcttgaggaaaggatgggcctgcatctagtaagaactgaggcccatctggtttcttctactccacccgttttctgagtgaaccctgacaccatggtaagactcccatcctactgcctgtggggtttgaaataactgctgcttccccaagctccacacgcagcacgtctggaataaaagcaatcaagatcaaaacactctaaaatacagcttttaaaaacaaagcattgcagtgggggggaaatggggatggttaatgggtacaaaaaataattagaaaaaatgaataagatctagtatttgatagcacaacagggtgactacaatgaagaataatttaattgtatacttaaaaataactaaaagagtataattggaataaatgtttgaggtgatggataccccatttaccctgatgtgattattatgcattatatgcctgtatcaaaatatctcatgtactccataaatacatacacttactatgtaaccataaaaattacattttttttttttgagatagtcttgttctgtcgcccaggccagagtacagtggcacaatcttggctcactgcaacctctgcctcccaggttcaggtgattctcctgcctcagcctcctgagccactgggattacaggcacacactgccatgcccagctgatttttgtattattagtagagatggggtttcaccatgttggccaggctgggctcgaactcctgaccttaggtgatctgcccaccttggcctcccaaagtgctgggattataggcatggccaccacaccgggccaaaaattaaaaaatatataaaacacaaaagtgaaaaagaaggcatgggacagactgaattggagacaaaggcatcagctggagtaacttaactggagagtaaagtcccggaaactaagattttaaaagtaccttctaaaaatacagggaggtatgtttaaaccagcacttccactggtccaccacaacttccagaacacccagctcagtgctccagatggcgcccacgtgttcctccacctgcacggggctctagaggcactgctgggagcagaaaccttatgtaacatctgcagaaggctttatggcactgggattttctgtattaacatctcaagagtcacagctcagatctactgttctgatagtatgaatgattctcctttccaaaccctttccttttccctaacagtcacataagagaaaagttcatcttttcctacataacagtgcagaggtctgcaggtgtcctgagggataggcggtttagctccgggagattgcttggtaacccaagttcctactatcttatctctgtcaaacctgagtgttctcatccacaagggtcccagttggtttatgttgccttgtctgagtttcaaccccgggggaaagcagaaaaagaggaaggtttgcagacaccgggcatgaaaagctgatctgttccttgttctaccagaacttaatttcctgaaatgaatactgatctttcctttttcccacatgtcatttgcacttttttgtgccagttgctagtggtgtccttggcctcacccactagatgccagtgccactagatgccagtagcttccctagttatgtgaccaaaaacgtccccacacattcccaaatgtcctctgagggcatattacccctggtagagaaccactgccaatgtcttcattaggcaatgtttcccagaggggccctcaattaactcttacattcttcctccacgctgttaatgaaaccgtcaccaaccacctgcttgagtctctaaacaatgcattcgtatactctttctgcaggtctggcagacataaactgagtttcgggctttacactgtagtgtagttgatgcaactgacaatgctgaaggtcttccaatagtctgttaaaattggattagtacccattgcttaaccatcctgagaatatgggaacatggggtcttggtttcttagctgagagtctggaggataaagaatgtcatggggcagaggttagagaaagagacttccacattgctgtgtgcgaacccgagtgttgcagaagggccacaagcatggcccgtgatcaggctgccctctaggtaaggttctttcccttccaggtaccacttgacccctacaatgaccctttggaaacaactccaaaatggtgttcctcactattttggattgaatgcaagtacgatgcaagagattatgcttttcttacctattgagatgtggggattttcaaccttagtcattaagcctggcagtattgcctcaaaaacacaaacatgtaccccttttgctgatttgcagttggggtcttatctttctgaatcctaaatgcaagtgtagttggtacatttgctttccccataagaacccaacctcattggcattaaaacgtgtcccagaaggcatctgttttttctctgccatgggttcccagctgggctttgctcagggtctgctgccttttcattggccagtgaagcttcaccaaatcttgacctttttgaaagtaaagcagttattaaaattgagaagctccactttggctggctctgagcttcttctcataaaaaacccatgtgtcttcagtgagagatttgaataaatcaaagatgccaagggcctgttctcccacatgtcatatgttccacattgttcagccgaaatacaatgccctcttagtctttactgatgtctgatcaccttgagagactgaatatacagatgaacaatggccagaccatataacaaaacacaactctggctcacgacctgcagcaacatgccggggaaaaaccccctttctatgacagcctaccagaaggtagcacactctaagtcagacttgcagaaaaatcaataacaaattacaatggtctagctctagtaacattccaggaagccaaacaataacccttgtaacaattgaccttaaattagccaggacttaataagtgacagcatccctaatttttgtttgcacttccaacttagcaccaactagaaagggtgaaatgtgcgcctctaaccaatcccgtagagtgccccacttctggttagcttgcctacatcttccccataccaactgcttccatcagggtgcagggaaagccttccctttttttcttctctaaagcactcctactcctctgcctgcctttgagtccctgccaaaatgcagatgatgttggctgactccttgctatagcaagctctgaataaatagccttagtttgttctcatttggttggtcttcactgatttgcacagcacacatggctctcccttagctgactgcagcacttggcactatggctcggtacatttctctttctgttactcatacatccagttccttgtggccacatttattccttgtgacaccttggagagtgccaccctgtctccctgccagtctgtcctctggcacttggatagacaccatttcttgagctgaccataaaacaaagcagctaacttcagttgaggggcatgtcgtgtgaaataggcccacctttatcttctagaatcatgataacagttcacaagggaaagaaggttgactgtggaaacagcaggtgaacatctccaatctcatgctaacgctgggcctacactcattggatggactcatgcgcataatggtgcacatctgaattttgatttctctttatcttttttccaaagtgtatgctttagttgccataacaaattacaacaaacttcatggcttaaaatgaccaaaatatatttgctcacaattctagaggccagaagtctgaaatcaaggtgttggcaggtctggagtctctccaaaagctctagaatggaatccgttccttgtcgcttatagtttctggtgactccaggcattccttagcttgtggccacattactcaaatctctgcctccatctttacatggacttctctgtgtgtctgtgttatttccttgacctctttcttaggtggacatttgtgataggattttggttcccaccagaataacccaagataatcccctcatctcaagacccttaacttaattaaacctgtagagacctttttccaaataaggtcacatttacacattgaaacctttcagtgactactatttagcctgctacaatatgtatgacatcactttgataccagcctctcttgagcatttttatcaggaaatctattgttgctccactgcttagaacccttctaggactctttgttgctcttcgagaatatccttagagtagcctgtaaggcccctccctacttcagctttctgtctcccttttctttgggtgcattattttagtttcttaactgcactaagtaacctcctgcctctgggcattggaatatttatttccctgcaaaaggaacaattccccaatactgccaccttgcctggttaacgttctgttcatacctccacactcaacttaaattcatacattttgcaaatatttactgagtctctgctgttttacgtgccgggatactgtagtgtatcagttgacagggtctctgcttttgtggaatttatactccagcggaggaaatgagccttaaacaaacaaaaacaagaacaagagctgagtttataagaactttgccaagaattaaaagggtgatgtgacagcgagtggctgagtgagtggtttctctatattggtggtcagagaaggtctcttggtgttgatgacgttgaagctgagctctgaacacaggaagaagtcagccgtggatacactgaaggaaacagaggaaagcaggcaccagattaagtcaagattgaaacaaccaagtgaggggcttgggttttactctaagcaagatgagaagttaggaggggtttaagcaagggcagttgttgtagtttagatatttgacctccaaacctcatgttgaaatctgatcccccatgtgggaggcggggcctaatgggaggtgactgggtcatgggaatggatccctcgagaatgtcttggtgccatccatgaggtaatgagtgtgttctcgctctgttagttccagcaagagttctcccaacatctagttgttaaaaagagcctggcaccttcccttctcccttgcctcctctctccatgtgatctctgcacataccagctccccttccccttccaccatgagtggaagtagcttgaggccctcagcagatgcaaatgctggtgtcatgcttcttgtgtagtctgcagaactgtgatccaagtaaacttttttctttataaattacccagcctcaagtattcctttatagcaacacaaatggactaagacagcagtggtatggtctgatttgtgagtctaaaagggaactctggctggcgtgtagaggaaacattgcaaagtggttattctgggtgagaaaggatggtggcatggcctaggatggaggtgatagaaacggatagaaaacaatgacttggagatgatgaggagatagagttcgcaaagcttgaggatggattgcataggggcaggtagacatgcaatcccagctcatatgctccttgtgtatgtactgacgagtgagtcctgctgacagccttgcacagtgcagtggcttcatgtgccaaagtgcaggagagaccaagagtctagaaaggcctacagtcttcctctaggataaaggacagacttcccagctctttaaaaatgcagattccctgcccttccctgaacctactatattagactcattggaggtagaacctggggcacttaaaaaaattaaaaacccatgtgatcccaatggtgtggatccacagaccagacagctcttgccattctcctgtggattgataagaaaattaccaagggaaatccagaggttcagggtttgaagtaattgtgcaatgtgccacttggaaaaaaaaaagactaaactaaaagcatgaggagataaattagcaagacaaactggtcttgaaaaaaacagcaaatatctgtcctccttcagtttttatcccaactcaaatttgcaaaaacaaccaactattatcctgagacccagttgaaagcagactttgaaagtggaacaagagttcatatatattgtcagctcatgaccacctggctttaattagctacaagacggggaggatctgaaagctagataagaaacaagaaatagataaattactcaagaatggagagctagaaaatgaataagaattcctccaagagaaaagaaaagggaacaaaaggaactaacaacaataaaaagagcataacaatgtgaactgaaataaaatttgatcactgtctccttgggtacggctcctttaagcctgactttatcccagtcatgcagaaaagcaaggataagcatgcatttcggtttggtggtccaatactcaacctactctagcacatgccccagtgggttgaggtcaagtggtctggaggcggctccctgagaaagtggaaatggttggagtttctggggaccacacagagatgatagtcaagaactccaggtgtgtcattcacagaaggtaagggtactgttttggatgatgattcgtcatagtttagattataatagggtccattcttattccattaaaacaaagccacagcctctgtgctgcccaataccttgggtcactttggctagggacattctctagcaccttgcaagatgagcctgccttgttcaggtcatcaccaggtcagcgaaaacaggaccaggctcttggtagaaggaggggctcctatataaaggaagcttccagaaaggcacatacccttgtccaggtgttctgtgaggtgggcatcaagcttgatcgggaacagagattgtccaccaggaatgaggtatctgtgtttggctagaagtcagccaagccttttcctgagaaagacctccaacctgaatccactttgggtaaatgaggtaagacaagacttgggaagattatttctccaatcaaaatcatctcagagcctgcactgtcatcttagggacaacaaaaaaaaaattctcccttcagactatactagaacaaaaataaataaataaacaaataaaaattcaagtgggaaaccaagaacaaaaactctaactgtaaggccgggaacaaaacattcagattgttgtgtaaacaaagtaatcagaatgtcataataaatgacaggctgaagctctgtgcttatttgaaaggggatcaagtaatactgaagaagagtgatgtaaacatactcctgagcaaagtctcactgggatagaatttaatcaagaggttttactttcaagaaataagcacaatcacagaggccaggaaacttagctgtttcagggaattgatgggtagcacaaatgtgtgtttggcagaacacacacaaaaatcaggcattaaattaggcataccctaaaaccttcaaattcatatttttatatataactcaggttgctgatttgtcatctaaaaatgaaaatgatcagggccttaccatgcaaaagtaatgataaaataatgattgtgtggtctgaagaaataaaactttgggaatacttttgattgcttttcaataataaatgattactatagtgatggtgatgttctgtacctaaaataatagtactgcctagaggagagatgtaaaattatagtagcagaagttctcttagacagcagggaaagctgctagataaaggctgaataggttccttttttttttttttttttttttgagacggagtctcgctctgtcacccaggctggagtgcagtggtgcaatctcggctcactgcaacctctgcctcccgggttcaagcgattctcctgcctcagcctcctgagtagctgggactacaggcacatgccaccatgcctggctaattttttgtatttttagtagagacggggtttcactgtgttagccagaatggtcttgatctcctgacctcgtgatctgcccgcctcagcctcccaaagtgctgggattataagagtaagacaccatgcccggcgaataggttcttaagaaaactttcatttctttccaaggggctacttaaaaatacggcagccaatcgtgtttctgggcaatggtttagatactgctctaaatattggcaggctttagaattaatgacttcttgggagattgcagaaatatctaccctaaagaagcaaaggatgttagaaaaagctccccccgatgttgcacaagcaatgccacttttctaaaagtgttcggaagagtgccacatgtgagatccaccggagaaattcaattaagtgctgcatatgaattagtttctggtgactcagttatgcctatgggtttctaggctgctcgttgaagaaagcagcatgagagaactcaggaaacagggataaaataaattctttcctttttatcataactcagtacatgaaccagacaacacccacatgttaggacagcttttgtggagtctgtcagtcgttttcctgacattttcactgctccagagaaaacagaaagttaggttatttcacttaaagattaaataggataaaacatttagaaaacctggagacaaaaatctcacaggttcaatatgactaaaaggtaaatttctagaaactacacttgctaggagcttcagtagattctaagcttccccatggccactcctctttcagtcattctctactctgctgagaaagcaactgtgtttttagctgaatcccaactgccctaaatgttagcttggaatccaactggaaagacgaaatagttctgcgttgcttatatttttggcaaaatgagactctgtcttcatagataaatccagctacctacagttgtcagtcacgtaagtgatatacttgctaacgatgctacatgttagtaaattgcttggggaaattacaggtgatctaagtgccacaggtgacctgtttgagtgggcagggaggtgaggttagaacacctgaaaatgtctgaatcaagtagaaatggacactcttggtgaacatctcagtgttaggctggacttgcatatttaagcagctccagtgggtctttaagtacaaggtggaaccccttaaagccgttcacaaccagccaacatatctgccatcatataagtgacctgctgtcctgttctctggatttctggctgcgtgatctggttgctcacaattcccaagggaggctgcacttgctgctcagccctctcctgtcatctgccttagaggaagttgctttcaaggaagagactgggtgggaaagactgatgaagaaacgggaatttgggaaattctatggccattcgtatcatttcaaaaacaaaacttctagtttcctattctgtgaaaaaccaaaggcaaacaattatctaggaactgatcttgtgagcataatttaatcacctatgtcatgtagctagattgttttcttaaggacagagttataccaataaaaatagaagctttcaagccagacactgtggtatgcgcctatagtctcagctactcaggagactgaggtgggaggatctcttgtgcccaggaattcaagcttggacagcatagtaagatcttgtctcaaaaaaaaaaaaaaaaaaaaaaaaaaaaaaaagaaggcttcagtggaaagcatgttcacacatacatatgcaatgaaaatttacgaatgaaaaagttctcctggattccaacaatttctaaacaatttcttctttttatattctttcacattcatccaaagtaaggcagacattttttaagagtgagttaattatcaaggataattctatgtgtcctactctgaaaacttcagatttccttttccccacttttgccaaaaagtctagtatttattatcctgtttctcatgttctctaattacttgactttccttttaatgagaagtatccttcccaccaactgtctaataaaatccttggttgtattgtttaattttaaagcaccctcttcatgaacaatttatctattttccctcctattccaaatgacagacattaaattacatctctgggtacatgtgattaatcttcaattccaaagtgaagaaaagaagaaaaggttagaaacatctaaaccctcttttcttttttattaggagaaagcagactttgggttgaaaacttgatttatttcccttaaacctatttgaagatcacctttacaacaaggggtcaaatgtggcttgaaatgaattccccatgcagtacttatgtaagtccctgggtacagcatttcaaggctaataaatattgtagttatacgaaggcagccatctaatatgacagcatataggcttttggagggattgtggtctttcaatgaaaaggatctggttagaagggagacattacagttgacttgtggccaagacgcctgaaatcagatgatactctatttgcatttggccctcagccatcaaacaaatcagtcattactgcaatccacaaggcagttatcgttggctaagtaattcacaaaattatttcagtagataacttgctgttggtggctagacttatcatcttcaaatatttaccccattaattgcaatggtatgtaaactgcaaggtaaacttgtatttctatgacaaacttggcccttttatttccaaaacaaagagtaaagtgtcaagccctgtttaaagacactcaatctcacatggcagaatttttttcctttccaaaaatattagcagagatgtatttatataattttaaaaatatatgcttttgtgtttagaaaacagataatcttgttctcttctttctctctggaatattctgtacctgataaaaattacagaaacctaaaacatcgtttagctaagagagaagctattgaacactatggtctcttagcaacagcaggattctcctgaggtctgctgggcctcactgagaaaatcatgttcatacacagaaaatatcaacccttcatgcataatttccctctttttctttaaaaataatctatcagaaagggtttgtaatggatttattatttttgtaaatacgttatatgccattataaaaattcaaaatgtgcaaaaatattaaaagaaggaagcaataaatcaccctaaattaggagttaggggctctccctgctgtgtcacacagcagtcttctgtgtctttcctggacaaccactttttaaagtgtaggacccagacttgtttctctgtctttgtttggagtcagctaatgatttcttaattgttttttcatttttgttttaattctttaaatgactatttgttaactttgttagaaatgtagaagacattctgtaattctgattcattccatcatcgttttctttccccccttaagatttggtgatacatcttatttttaaagaatgaacttagcttttgggtctctgagtcaccgcccaatcctcatttatgacatttattttgacaaacctctcctattaccttgattactgctttctcccaaatattttccttccaatttatttatgaagggaaatgaagagaaaatgcactaacagactatcatagccatgtaattaacagtgacatatttacttgaaatgtattgtaaaagaacatatagtgatgtggaatgtttatgagtgaaaaaatgtagattataaaacagtatagtgtgcacattgtatgcaaagaaacatttttaaaggatatccgaacagattttaacagtgtttgtttcccttagatcaaggcattgcttttactttttttgcatttccaattttctataatatatgtgttgttttttaaatgtaaaaatgttcttgcattttaaaacatttgaatatcttagaattaatttaaataatatataagaggataaagtaaaaactctctctcccccacttcctctcactcttagttcaatacgctatagataacaatttcttggctggtctgtcctaaaaggtcagagaatatataagcattataaaaatatgcataccagtatgtatatgtgtgtatgtgttttccggtataaaaatgggatacaaaacataatattgataactttgattttatttttgcacttaacaatctatatttgacaatttacaatattggcctatttaggttggcctaattcttattaatgacagcatagtattccattaaatggatatatagtaatttacttagccagatctctactgatagtttttacttttttccctctagatttttgtgattacaaataaactgcagtaaaccttataaaatactttggtatatttgtgcacaaaatttctagagacagagttgctggatcaatgagggcagactgacgtgtctttaaaattttgacagatggatgctgtctggcactattctttctcatcaacttggtatgagactgagcttctccacgctttgacaacactttccttacctgtttgagaaaaaaatgggatttccctgttgtattagtttacttttctttactacttagtaaattgaaaactttttccatatatttaataagccatttggactttctctcttgtaaattgcctgttaatatccctctgcttttttttctgttttttttttcacctttattgattagcaaatattccaatcaatatattatgaaatgtagtcttttgtaggacacattttgtacaaacagcactttccctttgtctcctaattttaatttttatagtgttttgtcatatagaattgttttatattctgattggccaatctgttcttttatatgctctgggtattaattactgtaaggagactatccaatatgatatttaaacaaaaggtcacaaagtattttcaatgaatgttctcattaggtaggtggcattatgggtcctgaaaatgaccaataaggcagatgacttaggtagactgtatagtgaagtctagtctcaaggaatggcataaatgttgaattttataatttttttaaaaaaaacagttgacagagagccaagctggattatctataatttttaaaacactttcaacctttcaagttactatttccttgtaagagttataacaagtcatagatgttttatccccaattataacattacttttgtaaaacaaaatgactatattgtaagtctaggtttataaatataggatgtttctttttctctttggataaaaatgaattataggactgctaatggatatggagtttatttctggggtgatgaaaatgttctaaaattgattgtggtgacgactgcacaattctgcgaatgtactaaaaaccatcgaatcgtacactttaagtgggtgaattgtatggtatgtgaatcatatctcaatagagctgctataaaaaataaattgtggtgtgttttgagtagagtgatgtgcaaagtaaagtgctgtgctttgtcaccacactgtcatagcatcgtctgcaccggctaggaaacggcttcattagggaactctagaaacatttggttttcagtggattcatcgtctgaggcccccttccctctttgtttattctcagctgtcctctttcccttctcaaattctttcactctctcctttagggtagagatcagggcagatggaggggggttttccccttcccttctatgtttttgtcattcttctgattcctgggattatataatcttaccgcaatgcagatgctatataacataacatgctacagtgtggattttagcatatggtaaatagtcttgaatgattcaaggcatttatcttggtgggtaccagctgagtcatatcatagggcagttttatgctcttgtgtgtcctcaccttgctgaggggaatgtgacacaccgtgttatgcaatcactatttcttagagagtctgtttcaccctctctccttgaacacctgcactgattattccttggtagactttgcttgcttcatacattttaatcatttaagagctttcactaaaatataacacaaagaataaaagtataggcattattgcattattcccaacagcttttgatgactgttaccttaatcactacattattaacccccactgtatgagtcaaagtcaaggtaagtcgcctttctctttccacaaatccgaaatgagtcactgatgagcaaaagtctgtaatttaatttagtggaatcatctttaacacacataactcaggaaacactgtcaatgttttctatccaatttactaatacatttgtgaggtgtttctctactttagacttaggaaaatgcgaattagatgttagtttccagtagaaagtgatcagataattaaacaaaatatattgagtattttagaggatctcagaaatggtccagtatatagtttaatccctcaagaagttcacagtcagcaaaggattttagtccacgccttgcactctcccatgataaagggacagtcacctaacacaggctgtttccccttcaaccaggtctcacttccctgttccctttatgtaacattgtctggtagcccctcctgttaaacacctctggatctttacctgttcacttgtatatttcagcataaggtaaatagccttggatgattctggaaaacttttcttggctgcaagcataaatggaaagcccttggtatcccagaggaagaaagaggcatcgctgaaatataccaaaagatgggctctgctctccacatgacagcacacaaacacaaattgatttgttttcagcagtgttttttacactttggcaccttgctttcagatagtcagtggtgcctggacacataggcggagccctgtagtaattgttcaatgaacggtgaatgaagaaatgagacaaaaccaaagacatctaccctatctgagtagtttcctttaaggttctgaactactgggttcggggcaaggagtccagcagaggtgaaggggcaagcagctttcccagaaagatttgaaatattcctgctgttggctcacaacaccattctaagtttattcattaacttatccccttggcaaatattttttgaacatccactgtgtgacatacaaaaaagaataaaaccccgtttctatccttaaagaacaaaggcaagccatattaacaactttgacaaagtcatcaatagctaccatttattgagcacttcctgtgtgccagtcacttactactggttgagcatccctgacctgaaaatccaaaatctgaaatgcttcaaaatccaaaactttttgagtgctgacatgatgccacaagtgaaagattctgcacctgacctcctgtgacaggtcacagtcaaaatgcaggtacattgcacaggttattcagcgtctccaagagagtcactgcacagtgtcctaccttttaatcaaaacacagcatggtaagtggagactaaagcctgcactgtctgttgttgctgctgtttaacagctgatccaggtattctgtgatgctgctgtgctgcttagttaatctgcacacattatttttttcctgtattaatggtgtatcatattttttactgttaagtacttatgtgtgaataagtgcaggaaaatgattgcttattggtagcctataaattcagagtcagtaatgatggtgatgccaaatcaccacagatcatccactggggtggctgagatagtgacacctttgctttctgatggtacaacatacatgaactttgtatcatgcatacaattactataaaaataatataaaatcaccttcaagcttatatgtataaagcgtacatgaaacataaatgaatttaatatttagacttgggtcccatcgctaagatatctcatgtatatgcaaatattccaaaatcaaacaaacaaacaaaaaaaaaacaaccaaacccttgtatctgaaatacttctggccccaagcattttggacagggatactcaacgtgtacttccccaacatgcatgaccttactatttaatgctaagagctaagcgcaaatgcagccccattttaaagatgaacttaaggcttagcacggcaaggaatttatccaggggcacacagctacacggcatctgcgccagaacttgaacttggtgcagtctgacgccagagcccaagcgtgtattcccagggtgtaactggcaccctacctaggaagggctctcgcagtggagaggagggagattactccagcctgggaacaggtgggaggaaagctaatatgcactgggcacctcgctctgctacacaatcttatctttgagcagtgcctagaggcagggtgtaagagtgtcctcaagaaaaagaggaagcagcatgtggaaagacacaaggcacagaggtgcccagggaagacaacgccagaaggtgctcagcggaggggtgggagtgaacagcccagtgtgccatgctacacagacacttcagctcttccttgttgagagtcttcttccctcctgagcccgccattaatgtgtaggcacgaggagcagagaggaccaagagaagatgaacaagagctcagattctggcagcatttcatctccaaactctcactgaccatgacctctattttcaaatatttggctgctgtaatgatgattaacaaaagactgactccaaactggggcatgattacaaagataatcatattcaagtagactttgatgcacactttcctttttctttttgagacagggtctagctctgttgcccaggctggaatgcagttgtgtgatcatggctcactgcaacctcaaactccttgactcaagtaatcctctagcctccccagtagctgtgactataagtgtgcagcaccacatccagctaagtttcaaaatttttttgtagaggtggaatgttgccatgttgttcaggctagtctcgaacgatctcaagcgattctcccaccttggcctcttaaagtgctgggagaggccaaagtgctgggattatagtcatgagccgccacacctggtcactgaatatgtatttttctaacaggaaaggtaaaaaaaaaaaaaaattagatgaaaattcactggatggattttaaagtttcctttggtcattcagaattattcttattatacctttagaaatatgaacaattgaataccagtagctggatgcttcatggttcttgggggcagcatttacttttagactggtcccatttaaattacatgtaggtatatttttctacattgtatctattttaaagtgcaatatgacatgatgcacacgctaatcttattcccacttcttggactgagtaaattgtcttctgtaagtgatatcagaagtggctaattatgtctttgcatttatggcatgtgggtagctatctctataaattattttatgacaagattttagagaggaacacaaataaagcacctattttataaaaaaactaaccattttacagtcatcttctttataactcagtgttcatatactatagcaaaaaaaaacaaaacaaaacagtaattgcctatactctatacagttgagagtaaacgctcttttagtataatgaatatatttttcagtgaaagtaaaatgaataaatttttaatagaaaaaactattacatctactaccaacaatatcaaatttttaaaaaattctacaaacgccagattgatttttttatgatttttttttttgtagttcacataaacctaaaactctctctaacaaaaattgctatttttctcctccaaacattcttagaataatacaagtaaggcgctttgttttgacatcattattcaggaaaacttcaaggatgagatgttaaacgtatatatgccccaaaaggaaagtaatattttgaatatttattttcaaacaaggaagaaaattggtaagatttgctgttagaacacacaattttcagagagactttgcttagactgtatatagaacaacaaagaaaagtaaaagtaagtgaggtctctaaaatatgctgttaggccaggcgtagtggctcacacttgtaatcctagcactttgggaggccaaggagggtggatcacctgaggtcaggagttcgagaccagcctgaccaacatggtgaaatcctgttactactaaaaatacaaaaattagacgggtatggtgcatgcgcctgtaatcccagctacttgggaggctgaagcaggagaatcgcttgaactcggaagccggaggtcgcagtgagcaaagattgcgccattgcaccccagccggggcaacaaaagcaaaattccacctcaaaaaaaaaaaaaaaaaaaaagttaaaatatgctgttagaacttgatatatagaaaaaaaaaagtaaagatttttttttctttgaaagaaaacagcaaagttcgtcttattgaggcatccagtaaagctccacagagaaatcattccctcgtgtctcttctgcactcggccttggcaggataagatgaagaggacgcagtccctacctcaggtaaacctttagaggggagggagagacaactccaccctcagatcattccaacataaggtgctaagtatgctggggtagaagacagaggtgtgtggagggggctctagatgctcagaaaacggacatttaacccatcttgagggttgtgagtgtggaggctcatagcacagggaacacttgcggtgcaccttagagaatgtgcagagataaactaggtgaagagaagagcaggtgccccaggctacaggacagcatggtccagggcaggagaggtctaaggcagaacagagagtgtgggaaggagaactgccagccattcttcattatcgggccattgaattagaacagaagatgaatcaagaggattctggagtggcagataaggaccagatgatgtagggtatttgggaccatttaaagaggatgggagaagggtggtaaggaggctccttactcaacaaaatattttaaaagaataagtaagacttgatctaaaacgatttgccttttagagagaacactgggaggcaatgtggaggatggagctgaggagtgcaaggttgcaggcaaggaaaccagacaggggcctgtgctgtgctagggaagtgaggagtgcctggacctagccatgatagcaagaatggaaggcgggaaccaggtgtgaggtaagactggctggatcagagagatctgactttttaggagctccataaatagccaaggggtgaagaaaccaatatgtagaaggaattcttggacaacgttgcttgggctatggcaagtggagtcatgataagccatattcttggagaacttttcccattaaaggctgtttatcaaaccataggaagaaaaatgagaaacagacatatttctaaagtagcacatcatttgacttttatgattagttgggggattttgttggtagtgatggttgggtagaggtcaagtctaccttctcatgtaagcaaagcataaacattttaaatcatccacttataaaaacaaaagcaactgaaaacaacagcaaacttgattcaggtaatccaatggaagcaaacacacctgataaaggagagtgtcactgataaaactgtacttgatagtcgtacttagagggttgctgtatcttaaacattttaatttttcatcttaaactctgcgtttataaaaattaaatttcacttggaattaagaggccatctccatcagcaacaggataaattattaatattgtaggtcttcaaacatatatgaaaacattaaattatctggatttaaaatatatgatctaaaatagcagagggcatatgtggctgattaggttaatccctttcttttgagtttggttttctttgattccctcccattactgcttccaagagtctactttaaacacacacttaaagcctaagaaagtctaaataagtcccaattacaggtacaagattatttcctggaactaaaaaatgtcaatgaatgtcttatcctagaagagtaagcagtaagacttctcttcaattgccagctaaacacttaagtgtcctagcccagtcttcccggaaaagctacaggaaagaaaccaaacatacttctcattaccccaagttcttggaaagatatttaatgaagtcttgcaagtatgcatttaaatggaaatgtctgaaaaacttgcttttactaatgaatgagaggaaacatcagcagtaaacatttcttatactataaagatttcatttgtaaataatgagaatcaaaattggctacgatctcaccatttaggcatatttgcaacaacattgaaggaaaaaaattcagtaccacctggttgatttaaaggaaattgtgaattatcactttaaaattcacccaggcatgaatgagtaaaaagcatatggcagctcttggttggtgtgaccatggctgccattttatgtgtcacagtctggttacaactttaagtttgtgtgctcttgaacatggtgggttttttcttttttttttctttttgagacagggtcctgctctgtcgcccaggatggagtgcagtggcacgatctcggctcacagcaacctttgcctcctgggctcaagcgatcctcctacctcagcctcccaagtaactggaactataggcaggtgccaccatgcccagctaactttgtatttcttgtggagacagagtctcactatgttgcccaggctggtctcaaactcccgggctcaagtgatctgccctcttcagcctcccaaagtgctggaattacaggcgtgagccaccacccttagcatgtgttttgattccttaagtgataagcagaaaatgatgctctgcttatagggggacagcatgcaatgactgacactgagggatacctctgggttccagtttatgccctatcttttcccaaacaagaacaatgatttcaattccatattatcaaaatgaagataaaaatgtgagatgctagcgtcattgatcccaatcatctccttattcttaatgttcccaagccccaggataataatatgagagagagagcagcttgcatgtttttcattttaagtatgtgtcaacgagaaatacaagtgtgtgtgtgtgtgtgtgtgtgtgtgtgtgagagagagagagagagagagaaagaagacaattaagtgtacataaagtgtacattgtactatacaagggaggctatcagccatgacactgattacaagaactagagaactaactaagcaagcaagaaaaaaagccttataaaaatgtgatttggccatgtggaaagaatactaatcatggtaatttctcaggactgcttaccctatccatatgtctaattacaatgcagcacagtgatgaatatgtaaatcattaaaaaagtgttagattaacttgtgcacatttttactacaacactgtacagtgttaaatctatcttcataatttatcactcataaactatggtcattggcccataacttacaactttggaagcttataagaaatgacaaggtgggaagggaattaaatgcatatttagagtaataataattttgaaaaaatggcacatataaatgaagacaaaaagaacgctattggtaaaagatatggcttgctattctataatacacgctgtttctaaattaaatttactttagatgtattcatgggttaaaaaatgaacatatatttaacaatataaattaaagaaaccaaatctatgtacagctttctctaaaatcatacctaccttattaaatatatttactaagtattttcttcattaattagcacagaaactgtagaagaatatgttacaggaattaagtcaagttaaaataaatgagaaagaaggaattattgaatataggtaatagaaataccttgataatttgggtaatacaacatatggccaaaaaacaaatgtaatcagggagagagtataaagctgatttctttagctttaagaggtttaggttcaactaaataaacttttttttttttttttgagacagagtctcgctctgttgcccaggctggagtgcagtggcaccatcttggctcactgcaacctctgcctcccaggttcaagcaattcttgtgcctcagccttccaagtagccgggattacaggcgtgcaccaccacacccagctaattttttgtatttttagtagagatagggtttcactatgttggccaggctgatcttgaacttctggcctcaagtgattcgccagcctcagcctccaaaagtgttgggatttgtacaggcatgagccaccatgctgggcctaaataaacattttataaaaactactcaccaagtgctctgtctgagcattgcgcaagcttacactactttacagcagtgtttctcaacctttgcactattgggctagataattctttgtttcggggagctgtgcattgaaggatgtttttccccggcttccctggcctctatccaccagatgccagtagcatcacctcccaccctcggctgtgataaccaaaaatgtctccacacactgccaaatgtaccttgggggacaaaatcccctctgttgagaagggccggattatagaatgtggaaataaaaattccgtgcatggagtcataactgaagggcacttgcagaggtcactattctcaataagaacagggaactttatgatgagaactattatgccacagggagaaattaaactcagcgaaaggaaagactcaacaaagtatttttttttcttaaggcaggtgttgagacagtgagaaagaaacaagaaataaggaaatgttctctctcacttataaaattaagaacagaggaaataaaattaattcagtaaacagtagattacaaaaatatgcttcagttctatattatgattcaaatagggagataaaaactgaaagataaaacagaggagacataagtagaaaatgacagacttggccaggcatggtggcttacgcctgtaatcccagcactttgggaggccaatgcaggtggatcacttgaggtcaggagttcaagaccagcctggccaacatggtgaaatccaatctctactaaaaatacaaaaaaaattagctgggtatggtggcaggtgcctgtagtcccagttacttgggaggcagagacaggagaattgcttgaacccaggagatggaggttgcagcgagctgggattgtgccactgcactccagcctaggtgacagagtgagagactctgtctcaaaaaaaaaaaaaaaaaaaaaaaaaagacagactatgaggatgtggaggtggggtggccttgcggggaggaaatagggtagaactttagaagacagagccagaggtttggtagttaaaagtggggattctcctggcactccctttgcgtgttctcttacaggcctcctctcttagaccctggcccagcctcctccaccaggctgtcctccatccttctcctcaggccccaccagctgctgcttgctacagcattctcttcagggaagtcctgaggatgctgccagaagatactgaacaccaaggaggggactcactcactgccaaccacgacttccacagaaagcttgggaattggggaatggcatgatcaaagccttgctttattatgcagagcaaattttttttttttgagggagcatttgtgtggagaatagtgaggaagggaactaagtgatgagagcctaagtcagagcaatggcagaagaaattgaacataatagaacggtttatgtttggtaccacactttgaagggtaatgtatgttatttgttctttatcatagtcaacaacaaatctagatttgctttatgcacaggaagtatttaatattagttaggtttaatttgattcaatgcattttaagttaaccaatgagccctattgaactcataaggaaactaaagccgagtaaggttaactgacttgcccacagttaaagggttggaaagttttggagccaagggtgaaacccaggtctccttaattcaaaatccaaggcttcaatcatgacaccagttgccacaaatctgtggcatatatggtgattctatttctttgccaccacagacattgctaatcgatttcctacgcaagcttggatatggcctcagaatccttccaaacacagggctccagagacccacctcaaatcaacttttctgtatcctggcaggatagcatgctctctctccaagataaaggaaggaaaatggtagaggtgatttgcgggcagaagcattatcacttggcagctgtgggcgtagattgtgagaaagagaaaagggtaggcatcaggaatgatgaaggatgtaagcctgggggatgagggggatggtgacactaattaacagaataatggaactggaacagaagcagagctgtaacatggtgaatgtggtcttgaggtgttgtccagttcttaaggcggtggggggtgctgtgacaatgacaggtgaaggctgctgcttatggaaagacacaggcagggcctcctaacacttctagcaatttcagcccccgaaacagtgacaactgtggatcctaaaggcatatgtccaaaagatgctggccaaacatttcagaaaagatgaaataaggaggtctcaaagtcctgcttttcaagacactgctaggaatctttttgcaaagcaagaaaattcttttatcattcaaacaattaaataataattaaaataattaaatataaataattaaaattaaaattttcatacaccaggtttcatttcagtgggaagaatggggcagggaaagaaaatggctcttcagcagccttctcagtgacaattataaacaatttctgtaaaacttcacaccctaaatgaagcaccaaacctgaagtgcttaatcaaaacaagatgttttgattgaaagaaagctttgatgagttgcttctatcaattgcccttcagcataagattagaaatgcaaaggcttctatcatccccatgatgttctttaaacttcattatgtcaggcacacatggcaaattaaacagaatgctacagaaagtgtctggccataagaggaggcagaggcactgcttacagaaaccttgctagacaactaattgaacagttttctaacctcagaacagacgtgctttctattatttagcatttaatatgcttcctctctctctctcatttctttttacctttagcttgtttcttcctatttcattgccatctactttataaatgtcttgatcaaattataaagttataacattatacagattctatttggtcccatatggctaatgtcaaccagagagcctttaatattttctaaggaacaggatatcatatttaatgccctcaaaactaatttcaagctaaaaaatgttgaaggctatacatacacacacacacacacacgaatgttctacaacaagactatccaccccctccaaagtcaagctttgatatatgccctaacaaaataaaaaaaaaattcaaatatgctttacaacaaactactaaaaaccacagaccaacataatttctttagaagcataaagtcacttgtgatccatatgccaaaagcataacaaaatgcaaaaaaagcccttaagttcattgattgacctaacaatatcaatttttctctacacttcagtgaattatatacatgaaagaatatttcgatcttaggaattcttcatctggttagttttgtttccagtgaagcaaacatcaaacagggtcttatatgtttatggataggtacaaatccatggaaaagattccaattacttttttttttttaaagtttaaagctgtgtgttatgtgcagagggggtagtacaaagagctatggatattctaaaccaaatattaaaacagcatttcaagcagctcaaagtatcatacaacattttcagtagtaaggaaatttcactcagcagcaatatttttaatagaaaaacttttttgtttttgagacagagtctgactttgttgcccaggctggagtgcagtggctcgatcttggcccactgcaatctccgcctcctgggttcaagctattctcgtgcctcagccgggtgccaccatgcccggctaatttttgtatttttagtagagacggggtttcaccgtgttggccaggctggtctcgaactcctcaccacaggtgatctgctcgccccaacctcccaaagtgctgagattacaggcataagccactgtgcctggcctaatagaaaaatcttctaaagactctttaactggggactttatcaaacattgcacttgctgctctgataagaaagaagggagatggggaaagtggtgggtgctggatggcatatagctccttgtctatgtccacctccttcccttttgcctttaggaaagaagggctggacaacgatggagagtccttgggagagccagaaagatttatctgggctagctggtacagtgaagaccaagcaaagtgggaagctttttggtttcccaaattagtctcaatgctttgctcgggcacggacagcatgtacagtaggcagcaatctgcaaaattgcaaaggggcattttggctttttgcccttctactgtgatttctgaaatctagtcaccttttctaaggtaccctcttccccatctctgcaactcattctgttatttcctccatgacagttgtcacaacctgaaactatctgtgcacttaattgtctgttttcttattgtttcctaccctaatagattgtcatttccaccagggcaggagcctggcctgtgctgttcacctctcatcaccagcacctagactactaatgcctggcacagagttggcctcaatgagagggtgtcaaaagataaacgaacccttgcttgcgcctggcctcctgtcctcaacttatgttactgtggccttatgttgccttgtggttagtcaaagacccccatcagtcttaccctccagccagccattgccattggataaacattgtgttttccacccccagctccagaggtgggccttggttgagctaagccaatcacagttttcttctggcacagtgtagaggtagacatgtgatatactttgaactttgtctattcagagaaatgctcagaattttgttcaatggttgaggaaagagaagatcccaccctatcccaggagccaggaggcgcacagccctgggggctctcagtggccacctcacttccacaaggtcaaagcccatgaggtcaaagctcacacacagaagatgacaaagtcaagagattttcaaagacagcaagccacaactctgagacttcaaaatcctctggctcaaatcaaccccgagggccacctctgaattttccacttagatgagttaatttgttctcttccttttaagactgccagagccaggccaggtgtggtggctcacgcctgtattcccagcgcattgggaggccaaggcgggtggatcacttgagatcaggagttcgagaccagtctggccaacatggtgaaaccctgcctctactaaaaatccaaaaaaagtagccaggtgtggtggtgtgggactgtgggctccgtctcaaaaaaaaaaagactgccagggcgaggatttcctaattgatactcatcccatctgaagtcccagtcgcccattatatatctcggcaaactttcatttaattaacagaataagcatgatcttaatgagatttatctcttgtggacagtatttttacttaaaaatggaaacaaactgatccgaatttgtgtttcattgttagaatgtttttgaaatggatgtggaatagcattgttcttttcctccctcagccacccacattgctagcttccaggaccactctatcctgttccaaattactggaataatccagacagcaaaacagatagaaacagcattgcaaccacacagcttccagcttcctgcctcatctttatatgggagactctcaagaacagaaaaaagttttaaaaagtttcctaaatttaggaagtagatgctttctaattttcactttatggttggccaagtattttctttttttttttttttaaataaaggaaaacagaactatagcaaagcctaacaatgtctgttaaatgaatagaaaatagaatgagaacaattaataagaaataaatttaaagagctatgagatttctgaggagagaatggttacttctggtgtgaagggttagaaagatttcacagaaattgcatttgtgctagattttgatggatggtaaagagcaacaggcaacagagatgaaaggagggaatgaaaccttaaattatgtccaggaaactaggagtggcccagttagacatgaacacaggagatgtgttggttgggggaagaagttacagataaagtctggaaatgcagtttgagagcagacttggagaactctgaaaccctcaagtcaactggctcaggggaaatcactgaagagttattagcaatacaatgacatggccagggtgagttgtaggacaccttggtttggcagtggcctgaagcatggtccagaagtcacagagacctaaattgggatacagagtgtgaaacttgattatgcaaattgagccattcttatcatacccaactaagccagagtcgagggcccggagtcaggtggtaagcactcaggacacagcatctgctccaagaattgacttttctgcaagcccagctgctaaaatggcaagctgtaaccttaaaaacagtgtcacctagtagctgctgaaacgacccgccatgactccaagactggtttttcctaccaccatcactgacacccactaatcagaacttgccagctcccagaagtttctctagtgccagtgagctttcttccacaacaatatgtaacatttcttttattcattttcctttatttatttgagacagggtctcagtctatcacccaggctggaatgcagtgctgcaatcatggctcactgctcacttgacctctcggactcaagtgagcctcccacctcagcctctgaagcagctgggacaacaggtgtgctctgccacacctggctaatttaaattttttttgtagagacaggttcttgctatgttttccaggctggtctcgaactcctggcctcaagtgatcctctcaccttagccttccaaagcgctaggattacaggcctaagccactgtccctggcccacatttctctttataataaaactcccaagcttccctttttcagacataccaaagcccacctcagtctgtgtgtatgccccaaattgctattctgtgattcccaaataaaacatttaatttagagatttgtttctatgttttcttttgattgcaacaggagcgtatggggaaaggcaggataggacagcctgcagaggccatcccaggccccaaagccaccccatttctctgcattacagttggtgtcagcagagcccaagccagggattaggggacactatggctcagaggttcaagctaagcatgggttaaacagtcttgtgaactatcctcagaccctcaccaccatcttcaattttacatctatgaaaaaactttaaaaaaaaaaaaaaagagcctaaaaaccaaagtatagagtataacaatttacaagtaggagctttcagaataaatgtaattattattatataaattatctttaagtttaaaaataacagttctaagaacatttaattttttttcctccttgttctggggtggctttgcgattttagtctagacgtattcatacccttaaaaatgagctttagagtttaggatcttaaaataggactgtgctgacataatacaactcaagaaggaacaatggttggggtacaatttgtttctcctttctcctgatgaggtttgaattagttggagatggaaaattcagaacagataaattatagaaggaactaaacttttagtatactaaaatgtattagtataaaagatctatgacattttgaataaggcatagatattaggaaacaagtctcagccaatactattcatcatttctcaatagaagataaaagctttctcatcatccaaagaggcaggccattcagttattcaaattaagtaggagaaaatgctgggttaaggacaaagaaaaagacctggattatgctaattcttaactagttgatgatagaggctcctccagcctttcttgtgctatcctttgttggggcatgatttagctccgaaaagcttctctagtgccagtgagctttcttccaaaacagtatgtaacatttcttttattcattttactttatttatttgaaacagggtctcagtctatcacccagctcctattatggatttcaggcagaaaggtagtttgtcatacaactttgtcccaatggaactttgctcttgtcgcccaggcttcagtgcaatggcgtgatcttggctcactgcaacctctgactcctgggttcaagcgattctcctgcctcagcctcctgagtagctggaactactggcgcccaccatcatgcccagcaaatttttgtatttttagtagagatggggtttcaccatgttggccaggctggtcttgaactcctgacctcaagtgatccacccacctcggtctcccaaagtgttaggattacaggtgtgagccaccacatctggccgattcatacttttttgaacaagaaaccaaaaagctttctgcaattttttaaaaagatgtatctctacaaagcaagaagaaaaagaaaacatgtttccagacgctttcatatctcaggaagcagagacaggctcctaattagatctgagcacgctcagtaggtatgtttggactgtgtcagcaccacacaacatgtattttcaatagcacccgggagcggcattttatgttgcagaaaaagaaatgaggtggctgtaggtggggccacatggctgctgagcctcctgggggctcctggatactcacatgtgtgagtgctcccatttcaacacttacaacttcctcctctccaccttgtctttctccaaagagggtgtgagaaatgaatatttgcacataaaatggaagacgctgtacatgtgacacacgcaaacattaaaaatatgggtcctggtgccaggcaggcttgctggcaatcctggctctccactgtatgacattaagcaacttactttgcctctctaagacttcctcatctgctaggtgggatgatactcacctcatggtttttgggtgggatttatgagattttgtatgcaatgagaaatggccggaacactgtaaaccctcaataaactctggttattaattgctgtgtgcatatgtgtgtgtgtgtgtgtgtgtgtgtgtgtgtgtgtgtgtgtgtattttttttttctacaaaggaaaaaaagtgcttaatttatgcattcataggaagtcatgtggcagggtttttaaagtcaagggtgaggacaaaggtggagtattgacagattcaggggacaaggaggcattttcaacgagagctaatcctttttactagaaagggtgaaatgacacagaccaccctagactttattactccttaaaagaaaacaaaaatctcccctgggcatgagactttgcctctctcaccaaaaacaggcttgcttctacagctccatcttgaaaagcttctagcagccagcacctccgtcctctgttctcgccctgcctcacctgtcattttgctaaagacacccgcatccatccgctttgcttctcctttgtcttcccccaggtgctatatcctgaggttactcaggagggaacaggagagctacaaatccagacacgtgttctccagctcctctaagttgaatttatcaaggagacaaaacaggacccaggatcactacctgcaactcccttaattgtaacctactttccgataaaaattacatgcttttgaaaccagcaataataaactgaaatgcacgaacagtcaacacaatgacaaaatgtactctgcagcgattgaggagacattgttacatcttttaaaatcaatctgtgatctgcctctacaggagatgaatgaaagtgcatagaagacaaaagaatgtgataataacagagataatactcagccccagtacatccaatcttttgttgggtcaataaccatttgaaaaggaactatggattttgtgcctaatagaaatgagaggacagctccaagataatttgaatatttctttcccttttttccttttccttcctatgctggaaataaaaaggttgatgtcaacatatttcttagaacatagagttccttaaaaccgaacatgtctgggatgaccaaatcccttcccaatcccacaggtttctctttgatagacctacagtgaaaactagcagcatcctgacttcccaggggccgctgtggcagcaccttcctggcaacagaacatacaatgaacacactaatgtggtaatgaactgacatccagagaacagaccagaaattgctggaggcaggaagcggggaatttgaggtggcaaaaaagaagagcatccttcacacaaacctgctatctctattctttgtgcaattaatcattttagaaactagcaaaagacaatgatgcataattggccgattgagggatgtgacactagagagattttttcaaatcttacttcgtgaaaagtcatcagtggtttcaaatcttagaacacaggtctaaataactgttaaattttggccaggcatggcggctgatgcctgtaatcccagcactttgggaggcagaggtgggcggatcacaagatcaggagatcgagaccatcctggctaacacggtgaaaccccatctctactaaaaatacaaaaaaaaaaaaaaaaactagccaggcatgatggtggatgcctgtagtccaagctacttgggaggttgaggcaggagaatggcgtgaaccccggaggcagagcttgcagtgagcagaggttgcgccactgcactccagcctgggtgacagagcgagattccgtcaaaaaaaaaaaaaaaagaactgttaaattttaccaccaacaacgaccttttcagagataaacacttgtaccattgctgctccaagcaatggccccacctctccagggatatttgtctgcccaccaccacaggacacccacggggccacagtggcagatctcctgttagagagaaggtggtgggatttctgtgaggtttcctttagtgctggagctcagctagacatgtggggccacatcactctggtctagaccctaggatgtctctgctgttgtagtatttatgccttaaataggaggaggcggacctctaggactagtattgcctctgccacccagaacattacaatttctcaatttaagctgccctttgtgttttgaagtacagctgctactaggatgtggatctgaacaatttcttgttctggttactgaggataaccagacagtaaatggtttaggactttagtggtcagtcatcgcaaagaggccatatacaccctttaacttatacagagatccagagagctgattggataaaacagcatctggccccagcagtgggctgattgttttgttgtttagagagcagggtgtcatagtaagggcacatactaggagtcctgtggccaggacccttggcccttccatcatagctgtgggaccctggagaggtagctcatctctccaaccatgcttcccaagtgagcaaataaggaccactgtaccttccttcggggtggctgtgagaattaaatggaatatgtttcatacagcgcctgccccacagtaaagctcaatcaatcaatcacggccctccctttctgaatccttccttgaattctttgcatcctcctcatggtcctcagcatagagtttggcatgcagggggctctcaggcaatgcttggccaactccaagtgatagcggcaggaggcacagaaattgtaggcagacaggggtaggtccgtggcaaaatcccatgtttgagccaaaaagccacagcacaaaatgagaacttctattcctgtttgcccactgtctcccaattagttctttctgaataatgtctttttaccaatcgaatgttgtctttttcaaaactacctatggcccaccccacccccagtcctgtgcctataaagaccccagactcagctggcagaagagagaagcagcttgactggagaaagatgattcgacttcagtgggacagctagactttggaggacagacggcttaacttcagggaagagccagctagtgacaaccggacttcagggaagattacctgcccaacctgacccctctccagctcccctctctgctgagagcaacttctatcactaagtaaaattttctacctccaccatccttcaagtatctgtgtaactaattcttcttggacaccagacaagagttcaggacccactgagtgcaagtacccaaaaaaagctatcacagtggccctttgccctcactggcagagggcagctgtcccacactatgaggcaagtccactgagctgataacacaccactgtccacggacagcagagctaagatagcattgtaacacaccctctggggtcttgggggttgcagagagccccacctggtctggctgaggggcctacagagagtctgctcctgctggcgcccagagtagctggccggatcctgcccttgctcactcatatgctccttcctgcaaaaggttgagcatggtgggccaaagaaatggggcacctccgtcgcaagtctgacaaggggtgagaaaattcctgcatcacaaggagcttcaaagatatgtgacttattccagggcagtgtcttgtaccatgcagcttgatgtgaaacggtcctggaatacagccacgtgactttgatgatcgtctgcccaaagggccttgtgttagttcagtttcagctgaaaatattacccaagtgcagtcccaaagcactattaatgcagggtcccatgatactggcctggatacttaaaagataaggaagataatggtatattctttcaccagcacctacctaaaatacattttccccttagcatacaatattcatacccagtgctcttgacttcacttcttaatgaatactttcctgaaaccatgtccaaccacaaatgctcaaatgcaattctttaacatttggcacttccattatgcctttggtaaagaatttaaattttttggtacatgtctttcttcctaaccactttctcaaataaattatttttaatggaaatacacagaaaaggctatctgcatatacccttggctatcaaagttttaattttcccactaaattacattttttttcttaaaactctgactatgcagactcctcacaatgttaggcagaaacagaataaaccgaattcttgttattcattgttcctaagtgttttttcccagcaaaaagtctgatactgggtgtgtaagtgtttcagaaatgttgaaaagaaactaaggctcatgcttctagacaaaacagaagttacggaagcataatatataaaaaaaattcaatgactagaacttggcagtttaaaactaaacttgcaaagggtaggtaaccaagtgctgtctacctgagcagggcactgtccaggaaagatgattattttttcttaaattctagcctgcattattttaattccaatttggttatgtcagttagtataggaaagaggtacgaatttttaggaaataaaaagatatattagggctgggcacgatggctcatgcctgtagtcccagcactttgggaggccgaaacaggaggatctcttgagcccagaagttagagaccaccctgggcaacatagtgagacacgcgtctctacaaaaaatacaaatattagctgtgtatggtggcatgtgcctatagtcccagctactcgagaggctgaggtgggaggatcacttgagctggagaggtcgaggctgcagtgagctgagattgtgccactgcactccagcctgggcaacagaggggagaccttatctcagaaaaaaaaaaaatatatatatatatatacatatatatatatatatatgtatatatatatatatatatataagcaaaattattgctaattgaaaagagaactgaaactaaccaaggccagacacagtggctcatgcctggaatctcagcactttggaaggccaacgtgggtagatcacttgaggccaggagttcaagacaagcctgggcaaaatggcaagaccctgtctctactaaaaatacaaaaattagccaggtatggtggcacagcctatagtcccatctgctcaggaggctgagacacaatgatcccttgagctggagaggtcagggctgcagtgagctgtgatcacaccactgcactccagcctgggtggcagagtgagattctatctcaaaaaaaaaaaaaaagaaactaacctaatattttctgaggctgccaaattctgggctgtttatgaaccatctcacgaaaagacagaagtttttttgaaggcaaagatcatagcttattcatcattctatccctggcaattagttgaaggcctggcaaacagtaaaatctcataattcaatcaaatataaagaggaaggagatgacttgaagatgagtaaaagatcactggagagagccaatgattttaggaattgttttatgaggcaataaggggcaaataaatactgaaaagaaacatttattgttgcattatgctttgaaatctactaaatgtatccaaatttcccatgagaaagttaactgctattcagagaattctgaaacataaaaataagttaagctcaagtataatgctatcatagcaggcatttgaagcaatttgttaatccttagaacatatcactattttgcagattgaagaaataaaaaattatgttttttcagagtcacagaaactcaatagttctaggtcaatactatgaaccatgctgaagagaataacttgggtagtaagtgttgtaacacggagggggtccctttaaatcatagcaccctgatgttaccagccgcaaaggctgtgtatccccaaactatattccctacttttgactcctggagttacctattcaaagatgagttttaggctgggtgtggtggcacacacctgtaatcccagcactttgggagaccaaggcaggaggatcgcttgagctcaggagttggagaccagcctgggcaacatagcaagatctcttctctactaaaagaaaaacaaaaaactagctatgtgtagtggtgggttcctgtagtcccagctactaaggaggctgaggtgggagaataacttgagtccagaagttgaggctgcagtgagctgtgatcacaccactgcactccagcctgggtgaccctgagaccccacctcaaaaacaaacaaaccaacaaaaacacagagctgaattttcagtctgaataataattttttttaaaaggctaagagctatgcaaaggtaagtaatctaaacattcaaagaaatgttgagttactactttacttatgttttgattgatcactaacctgtgtaggctgccaccaaataaaaagtgaggcagctttctttcaaagctcattcaaatgttcaagcctgacacatccgtttgcaaagaagaataagagtaagtattttaaaacaattaaacaaatcaaggaaatttgattttaaggatgggagtcaaaggtgagtctcaggtcaatgcaatccttaccctaaatctaaccttcaggctctgcgtgatgaggcacttaccttctgcaaaaaggatcttcaggtccctgttagcataggcttacactagatttccaagatgccagggagcaaaaccctaagaatcccatgggcaaaagaaaccaaaacacccataacaaataagcaccataaataacgtttgcatttgaacacagaaactgatcagctatattcaggacagaaatagcaaatgagcatttgaaagggatctggtgaccagtaactgcaacccagagccctgtacattatagaaacacaaagtggattagcaccatctgggacttccaggcagtccctctgaccctctaggcagctctcttccccctctgcctctccctcctctgccctctccatcttccttacaattagccttggtttccttcccccatgtaagaagcccagccctgccttcaacaggaacatacagcagaggcgcaacacattttaaacttccatcttctgatcctgcccttctcctttgttctttttatctctttcttttcttcacttatatttccctctctctttctcctccttcctttttctctccctctatgtctctgtagataccctttccttagcaggtcaaaacatgaaactttaatacacacacacagatacacatgcatgcatacatattacatatgtgatggtgaatatctatctatccctatctttaaaaaatgctcatgggattgtgacaaggttcaggacatgctgtcctaactacggcaccttggaaggtgagggcattcaggaggcagcatgtgcaggaaggcctctcagaccttccacctcccttctctcctgcagcaggtcataaaacctagaaaggattttctgaccttccagtgaagctgatcataagaccctccctcactcaacaggtggccttcttctacctcgaggaaaatagcatcattatcgctgaagacacagggccacagagaagaatctgaacaaacaggccttgcttaaccccccagttcatgacacttaactcataccctttttgccctatcacatttctccatgactgtccacccttcatcaaatctagcacaaaaacacacaggttgaactgtttctatgggtcgttgtttccttatgaaaactctcgtgtcacacgaagctcatattaaataaatttgtatgtttttctcttgttaatctgtctcttgttataggggcctcagccatgaatctacaattggagaggaagaggtatttttcctcccctataattgcatataactaaaacaataacgctggatggaggcagggttttgttcggttttgtttgctattgtcgggccctcaaatagcatttcctgtggtcagtgatgcttcgggggttgccaggttgtggcacacccggctctccaaaggtgggagctttcaagcaatcccgtcctacctctaaacacagaacacctggcagggacttaggaggtggaggacaaagcctcaaggaggaagaaaagaaaaagagaaagcatgccaagccttgtgtgatccagttttcttctcggcatgttataaattaaacaacaactgaaaacaaaaagaaaatgaaagcttataaactggatacctactgaattcgaaacccagctgcatgccccccacctaccatgcctcaagtaccatggtaacgtggcattttcaaaatcattagttaccctgggaatattttaggcagagctcagcagagcatttcctgtggcggggggcagggcggggaggcctccagtggagaggcgttctctagctgggctggagactgcacaattggcctgacacacatttcagaatttggggagaattccagaggttcaggcagccacgggcaagggcagagagccgccagctcatgcccctgaaagccagacagaagagaaaacaaatagagaccatgtccaaaccccaccattaatctgctattctcttctctaaacactgttacagtcaaatggcaatgcttattcttaacaggcatactaagatgtgatcatttcaagtgacaagcaaaaagaatgaatcctttctacgtatcctcatatgactcataaggcatacacaaatttttatttttctttctaaaatgcattagagagtaaatttggaataaatgtactcttcccaccaaatcccgatacaatatgttctataaattgcatcaaagtttgtaataaaaggaacatatgtttgtcagaggtggttgcaataggtaatacccggcagacagatcatctgtgaggttgtgtggattcaaacccgaaacgtggaggagtggggagttatgtggggtagagtgtttcagcttatgtgaccatggagagtgttccaaacattaatcactaaaagttaactgattccaatgtcatatgacacttattgcatagtagcttccatggactggactctctcaccacattgaagacagagtgggatcataaaaccagccctgattttaaagggcttagattccaactcttatggtctttgttcgatcattcaactgttcaacaaacatttgttgagcaactactgggtgcgaggtactgaagacagagcagtgaacccccaggaaatcgcctagccttcctaagcccattattggcaaagaaaaatgggcactaatcatgactggccgtatctacctcacagatagttgcacagctcaaataaagggatttatgaaagcatcctgaaaatggggaatgtctataacaacacaagtgctcctatttaattaattgtcttataatttgttaaaggccaaaaagaaatcttccttctgagtgtgtttttttttttttttttggaaacggagtctcactcactctgtctgctgcccaggctggagtgcagtggtgcaatctcccagctcactgcaacctctgcttcccagttcaagcaattctcctgcctcagccttctgggtagctgtggttacaggcatgcgccaccatgcttggctaacttttgtacttttagtagagacaaggttggccaggctggtctcgaactcctgacctcaagtgatccgcctgcctcagcctcccaaagtgctgggattacagccatcagccaccacactcggcccccaagagttttaaaacaagttttggtactaattaagttttttaaaagtgcatttttttttcattctggagctagcagattcccatctttgggaagaacaaatatctattcctttgcctcaggaagacttcttcaggcttgtagcgtctaaggcagtgtgtggtgtgaattctatagcatcttcaacaaaccaaaccacacaaacccttgcatccagtggtttcaaacattttaaacaggggattgtttcttaaatcttatgcagagcccaaatgtttacacagatgccagtggggctgctccggctgaaggagagggtttttattttggctgcaaactctgaggatcttcttggaaccccagagaacgctgaacagtttgaccatagccctctcccagactcctctctttttccagaagacactacagcataatggttaggcaggctggatttgcaacctggtttcaacaattaaaagtttaccttggctgggagcggtggctcatgcctataattccagcactttaggaggctgaggcaggaggattgcttgaggccaggagtttgagattagcctgggcaacacagtgagaccccacccctctcaaaaaaaattttttttcattaaaaaaaagaaaaaaatgtttaccttctttagacctcatcttcttcctctgtacaatgaggataatgatagtagcactcttgcgggggggtgggggggttgtgagaattatataaattcacccatgtaaagtgcttacgacacagccggcaaataaaataaatacattaatcagtagcaattttccccttcaagtccacctttatgccactgccagattaattttcttaaattactacattccatgtgtgatcctcgtgtttcaaacttcacaatgttcttcctccactattatataccaaataaatgataaattccttctcctgatataaatgtatatggacatctctctactcgtatctgcaactatgtccacatcttcaaccttccatgagactttccagcctcattcatctgtctcaccttccactccacagacctgcccttcacgtgtccttgccttgacacgtatggagcatagcaatgcacatagcatcacggaagggactagctgtgaagtgtatgacaatatcctaattgggttttctaagtaaatcagtgaggcagagtctataaagggagaagataacgagaaagctcagtagtgtgtttcaagtgtaaaatgaatagcaaaaccaaaagcttgaacaggctagggcagttggtaagtgtattctcaaggagttaggcttgaagcaggaattgaagggaatatgagccaagtgaaggaaaatgcacgggggttgtggaggaaaccaatgagtgttacggatggggccaatgagagacaaggttgagaccatggaggacaagaagggtgttcttggtcctacacacactggttcatcgaaagttttctaaaccggagattgagggccatgaatctgcaggctgggtgcagaaggaaccggggtgggaggtgccgggaggagggacacctgctctggggtcatctctaagcagcatcccccatacatacacagctgcgtgtatctccttcccaattgcttctccctgtcaccacccgatgtggcccccagcaaggaaattgcccgtggtccctcacctattcctctcctcactccctgcattcagtaagtcaccgtggccactcattcctgccattccatgtttcctaattctgtccactgctccctgccccccacggccaacagcccacagcaggccaccaacacctccacaatgactattttgaagcgacctaactggttgccctgcatttacccctgggtccctccaatccattctcagctgctttcaaagagatcttttgaaaatgcaagtcagatcacgtcataccctgctgggaccacatcctattattcccaggatatcccaaatccgtaaaatggctttagaaggtttaccacagcctggccccaaccctgtttcctaccactttttctctccctccttctactctagccacctggatttcccagttcctcagctggctggtattcaagtgtgtgttccctgtacctgaaagcattcttctctcatcccacctgcccggccacaacaccccactctcacccctacatacccatggagcatcagaccccacctcgggcaccagctaacatctatcactccttcaggtttcagcagaaattcgacttcctcagagaagactttcctaaaacccaaaccttagatccacaatgcatggtctcacagccccttgtatgtcctttttcatagtacacatcattcctataattattcctttaaggtcctgtccctatctcacatgagaccttaaggttccatgaggcaaagaccatgtctgtcttatgtaaatggcagcagcacccagaaaggtgtgtggccaaagtgaaacaaatgaaaatttgttgactgaatgaagagaggaatgaagagcgctaaagaatctcccacagtaactcagagaatgaaagaaggacctggtgacatttggcaagatatattatggggctgatgactgtgggaaggggcaggtaaggtggggaaaagaccaggtgacagggcagagataaagttgccaccccaggagctgggaggaaatggtgtcaatgacacagctggatgtctggactagaaactgagttttggaatttcatatgttgggtagaagtaaaaataaatagagaaacatagtgcctactaccttaagtgctccatacagcctcattgatgaagataagttctatccaacaaaaaccttaccaaggctagaaaccctgtcctgaccttgaaacatataggtagggcggtttttgtttactttttaaaatcatcacttgagttgaatcagggctcactttcaatctctgctatttctcttaagatcattatgagaaagtgactgaaaaaataaatcaaattttttaatgtaaataataggtactataatttcacagctttgcacacagtttgtacccaataaacatttcttgggggtgatggtagcttgtttcaattatcttctacctattaccttccctttccccattactcatgaattccttggggagaaggaccacatatcacccatgccctgcacacggcatcaagttcagagctacgcatgcagcagatgatcaataaatatgtcttgattgcctattagatacagcatagagcattggcggacagtcagacccaggttctgaatctatttctttgactgtacaatgtaactgaaaacctctatctctgaacaagaatattgtgaggattgtaggcaatagcacacaaaaaaagcactgcgcaaactgcaagaacacaaaacctcacacttgccattattattaatacagcttggaattttagcactggaagggaacggatggagatggagatagaaaggcattgttatgtattgggcataaatcctggttgaagactaagccacacacctggcatgtgttattgttttcaatcctcacaataaacctgtgaagaaatgggctccaagctattggacactttcccaaagtcacacagcttcaagtggcccaagtggtgttaaaacagatgtttgacttctaagccccctgccatccctgggcacctggaagcctgtctcagcgcacccatctgctttagatctgaagaagcagaggcccggagagctgcctcatgggaacgatgcaccagaaatgaagatccaatcctggttacctttccttgttcctgaaagtgacttggcttctctatcagaactttaaagaattggagtaactgctatgaatcaattgggaacttaagtaaagtgaacaggtcgaccagccagtaaactacccaggaaaagaatgcaggaactccagcgggaaagacccctgggtggatctcccagggttgtgcactgaaataaaggattgtgaccagatgaaagcaactgatggggactttagagacgggggtctcaggactcaggtgagatgctaagggacctgcttgacaaggtcacactccagtttggtttggaggagagcttgacttccaacccggctctggagcacagtccaagatgccactagcttcactttcttttttttttttaccacctttcccctgagctgttgaagggcatctgagtcactgggaacacggccagggcttggtgggctgccctgggcctagggaacattgttaaggaggagacaaccaattctgtgggtgtcaggaggcttaggagggagcagtggggggtagagaggctatgggacaaatgataatctggtggcactaaacataaaggacacacgctggctcagcccctgattcaccagtgagtcactgtctgtgagcagaaagtatggccctgagttgtatttcagaataccactcagggaaaaatatttccctgctatctatttctatatgctgcagttcctgtattactaagcattaacgtgttagacataagccacacacctgtccgagaagggtgacaattttgtgaagaatgcccttgaaggacagaagaaaccctgggggtctgttagcccttgctgtcaagaataggacaataaattcagggaattttgatgctcacaagacagtaagaagcagaacaaatgcacatgctaaactagacccccttctagcaaaaggagaggtcattaaggaccagaatagttcgagggatcataaggatctgggtatttcagctgtgtttccaattaccacgtcacccaccatttactcaagtatcacagccgaactgcctttgactcccatctctccccagtgctccccaaagtatacttctccctgacctttccaacctgtccatgacttcttccctttaaagccccttgatgtgtgcagctgcctcatctggttcaagacctctatgtctctatgaactgctgagtctgattaaagtccagagtttctgatgtgagataagtgggggcaaatcttttttttttttaaatggctgtctcagagcatccagcagaccgttacaaaggctttcttgtcaccgtcaagaccaagtcctggatccatggatgagtcttgaaatggaaggcttaggccgggcacagtggatcatgcctgtaatcccagcactttcggaggctgaggcaggcagatcgcctgaagtcaggggtttgagatcagtctgtccaacatggtgaaaccctgtctctactaaaaatacaaaacaattagctgggcatggtggcacacacctgtagtcccagctactcaggaggctgaggcaggagaatcgcttgaacccaaggtgaaggttgtagtgagccgagatcgtgccactgcactccagcctgggtgacagagcaagaccctgtcttaaaaaataaaaataaaaaagaaatggaaggcttagtattcttagtattctgcacatgaatatttatttttctggagtagggtccatacctctcattaaattcccatgaaggagcatattcaccagaaaactaaaaatcagtggctctgaccaaagttcagctaactatagcctgaaagccaaacctggcccattgcctgttcttatgaataatgctttataagaatacagctacctgtacatgtttacctatcatctatggctgctttcacatgagaatagtagagctgagtagttgcaacagagaccatatggcccaagaaggctaaaatatgcactatcttgctttttccagaaaaaggctgctgaccttaaatttagacaagctctttttagtaccatccactacaagagcacttactggctaataattcaccaccaaaattcaaaggtgagcaaatgattttagaataaaagtttcctggctctgatacatttgcaaacttatagacatctactacagattggcctgtcgtctttggaaacctattgggcagaggagcggccaaaggagaagctagttagaattcttccaagtctacctgctacgggcatcttgggtcaagactcctttgcaaactgctagagaagaggtagtcaggcaagagaattgtcatcactctaaataattcagagttttgatgctggctacaaaccaaacatgagaaattatataattagcagcagcacatttaaaagacgatataaaatatgctaatgttctcaccacgtgaaggcaaagctgcagaaacgatgccatatattagctagcctaggatcagtcgaaatacagaaaaatctcttaagagcattttaaaaataatgatatcaatcagtttgatagaatgcctttcttgggctacaaaataggttaacaaaaagtcttattccattttaatgtgttttaagttactcatgtccattttcagtgcattttttgataaacagcatattatgttaattttattatctttgagtcaagaactaccttttgtgtgtttggttgttgtttttatttttattcttattttggatagatctcaccattctgacctatttgctggctgatcagtttacatatacggactctaattatacacgtgcatactcttcattcactctgcagagaacaaagcaaggagataccacagaaaatatgactacacatccaagatatgcagtgtaattctgttagtgtttcccatgcttgaaatctcaagacctatatgctttacttaaacccgtagtttgcagtttgtatacaaaactaggtgtccagagctaggggtgagagttacacatattaacagtctcttggccagaagggaagaaatatttgcaaatgtaatctttttttttttttttcctgagacagagtctcactttgtcgcccaggctggagtgcagtggcacgatcttggctcactgcaatgtctgccgcccaggttcaagcgattctcctgcctcagcctcctgggcaactgggactacaggcatgtgccaccatgcccggctaatttttgcatgtttagtagagatgggtttcgccatgttggccaggctggtctcaaactcctgacctcaagtgatccgccctcttaggcctcccaaagtgctgggattacaggcgtaagccaccgtgcccagctgcaaatgtagtcttattgtcagggacctctcaggagtcttattccactcaacagtgcgccacatgctggaatttctaagctttctgctttggattgtcaagcagcccttgtaccattttccaatctgagtttgctaagcattgctgctgactgtggatggcctcttcctgggagtttcaccacaagctagcatcccccacattcactagcatattgttcagataaatgtttgttaaatagttcacactaaagatctcaaatttgctccattttaatcaagagatgacagtttcttagaactgaaaaataatatcaccaagtagtaatatttgtccattatattacagccttgcaacatggttttcacctacatcatctcttttgatcctcatgacaatcttttgtgattggtactacttttgtctctcttttactgtggaccttaactcagagaggttaagtaatttgtccagggtcacacaggtgagaagggcaggagttggtgggacccatgacccccatctccagagctggtgctcttccaagggcacattttaggctgatgctgatgtactgactgaatggtgcaacttcacataatggaatgagccctagactggaagtcagcagcttttggaagtcagatgcttcaggcctcagctgtgacactaacctgctagttgactttgggccctcacgtaatccctctgggctttggcttcctcatattgtgaaatgaaagaactgaactagaaattccttaaggttctttcaactccaacaattaggaattttatggagcaaaagtaatccagtttccaaattatctgtctgaaggaaataatacattgtgtgaaatataaagtctactctacaagcaaatgaaagagattttgcattatacatatttttagatgaatcatgccataagtccatccttctcaatggctaagagctaattaactaaaagctggctgtgtacacagttgtcaaaacatttctatgacctttatgcagaaatcagactcttgagaagggagtgatcagcctccctgtcctgagctgggagctagtcattttgcctttctctgtttgcaaagatccaaagtctctgataagttcattgtttttgttacaccgtttgatttctccttattataagtgttcagcattattctcattacagaattagcgtggatatcctcccccagatcttgacagcttccatgctgtataataaaacatgtgtctggttttcttcccaggttcctggcagggagcttctaaacccttggaaattcccaagtgataacactatgttgggtcctttggatgacaccaagtttatgctaatgagatgactcaggatgggggccaatcacaccagaaaggtcaaccatgtgattagagggttagggctttgactcatgtgatatcagcctgacctctggagactcagttccaatcacagggcctatgacgtaatcacccatgcctacataaccaaaccctggtaaagactctggacgctagcagctgagtgagcctcctgcttgatgaacacatcagtgtgctgagagggtgacgtgtcctgatcccacaaggagaggacctgcaagctccacttatgggcctctcccagaccttacccctgtctgtcgcttcaactggctagccctagtctgtaggctttgtaatgaaactgtaatcataaagatagtgctttcctgggttctgtaagttgttctagcaaactattgaattcgagggagctgtgggaatccctgaatttgtagccagttggtcagaagtgtgggtggcctggggactcctaaatctatggctggtcctgaagcgtgggcagccttggtggggatggtgcccttaacctatgaagtctgggccgactcctggtagttggtgttggaactgccctcagcactgcggcctgcctgccactactgagctgtgcatgaggacaggtcaggcaccctctcacctcaggccctctgcactaactgctccctctgcccggggatgattcttgcttctgggtcctgcatggctggctccattacccctcaagtctttgctcaaatgtcactgcttcctgaagtcttgccccctgcagcctccccacaccacccactctccatttactccctttctcccttccctatttcattcttcttcatggcacttaccttccgatacactaagtaatttgcatatgagattttgtatgttaaatgcattcctctgataagatgtaagctctatgtgggcaagaatttttctctctttagttcactgtgatatgcctagtgctaagagcagtgcctgcccattgtagatattcactcactattagttgaatcttgccaaatctatacctctatgcatgtatacacatataagatcaggctcctgcaatataataaattgaattcatgttaattgtctataagcccttgtgggtagtatattgagctatgctaattttcatatttgggaaccccatagcatatggtgacattttatatctcacttgagcaagaagcagctcacttttctatacactttattttttgagacagagtctcactctgtcacccagactggagtgcagtggcatgatctcagctcactgcaagctccgcctcccaggttcatgccattctcctgcctcagcctcccaagtagctgggactacaggcgcccaccaccacgcctggctaatttcttgtatttttagtagagatggggtttcaccatgttaaccaggatggtcttgatctcctgaccccgtgatccacctgcctcggcctcccaaagttctaaacactttttaaaaagcttatactaatcttctaacttctaatggtattctcaggaaaattctgttgaaaggctgtcaagtgtgaaacaaacaaataaaaaaaggtatgaaaacataaatttggctatgttaactttaaagttgaggggcaaatctataaaagcagatttttctttctccagagctaataaattcaaaagctttataacctcggttctcaatagttgggcagggagctctgtggtcagatttgtgggatgtccccactgccatattgttaggctgtcctttagtggacaaaaggcaatcactggctcagttggccctggagtgctttcataactaaacatagaggctgatttttatctttgagcaagatgatgctagtttcatcctgctctgctggcaaagatttgcctttcctcattcccctactctaagcaaacatgtatggattcttcttgtccatttgctggcacttcctgacagcactgccacttttcttcagctgtgtcctctgattatttgactaggagtgatatgaacttagagaaccacacttcctttcatatctgttttaggtcttcaggaaaagtgagactcatgatttcacagtgattcagcctattgaaaaatgaagatgtcacccacacaatcattttttttcttttttttttttttactaaaagcttatctatgtgtttattttccagaggtgttaagagagaaaaacttagcttcaggtagtgaagagccatagagtatcagtatcttattatattttagtcatttagaacacttacaaaaataaaaagctataaagacagcctatatacacatgtatcaaattattacccaattttgaagctagattttaaaatcaccttcacatcacatatactattttccacagggattttcacttcatctgctttcctgaagtagatatttaactttccagaacatttttgtttaaaccctgaagtagatatttaactttccagaacgtttttgtttaaacccaagaatacttgacatgcagtaggctcttaactagtacatgtttggtgtgggaaaacaaatgggcatatttcaaataggaacaaaaacataagttcctatgccctgtggacccacactgaaaggaaagtcctgaagttccctcctgtactcaggggtatgtgtgggtcagtgtaagggacaaaacaatctgttgtcttcctctgtaggacttgttaaaaagaaattaattggattagccaggcatggtggtgcacactggtagtcccagctactcaagagactgaggcagaagaatcgtttgaacccaggagaggaggttgcagtgagctgagatcatgtcactgcactccagcctgggtgatagagcaagactccatctcaaacaaacaaacaaacaaaaacaaacaaaaacaaaaaaaacaaagcaaaaacaaaagaaattaattgggaccccattagactgagatgattccagcatcttggcttcctacataagcaagctgaaatacaactcagtgtgaaaggtaaaatgaaacttaagcataacccatcagaaactgctaaccaatctttaaccagggactttccactagaataacctaaataaggatactgctccacttcaatgagtcaaacattttctttgccttgagtcaatgttcaccttataaaagcctcttctcatgtcactctgttggaggccaaagagcttttggtttggtgctgcccaattcatgaattgctgtctgtttaaataaactctttaacattttaatgtgtttacgtttatcttttaactgtttgttaaccagctgcagacaatcacccagacaaagctaggcattgaatctgaggctcccttacgttgtttcccacaaggaaatgtgagtgttagcataccttttcatttgttttcattttatcagagtttccaggcagctatgctgttggtctttggctaggcaggcctctagcagcgtaactcagttgggaaaaacaagggcctggaaatcagacctcttttcaactctctgctattatttatcctcaagcagaatttggatgcttaaagttcttaaatggccagaattaatgactaaaattaataagatgctatctggcatgaatacaattaaagcactacaaggaggttcaaatattcaattaaacaagtagaagctggcttgacatcacgtcagaaagccccagagagttcagctggccaaaagctaaccatgagcctgcatggtttggcaattgttaaaagaaaccttaatcatgcttaggctgtatttggacaagtttgttgcctctatcaaataagtttatattctcaatgctctttgaagcccccaaggaatactatgttctgttctaggtgccattttagggaggatattgctgatcaatatctagtattggatatcaagagaagtgcaaccaggatagtggggtagtcttaaaagaaacagctgaggaaactttgtctggaaaagaagcttttgggaagtaccaggctatagtcctcagcatctgatgattgacagatggagtagattccttctgcatctaataattcagctaatatttcctgagctgttactacattcatggtaccctgatatgtactgtgggatatatgttttaatgatacacaggaccaatctcaaggcacttacaataaagtaagataaagtacaaagtgtccaggatcctcagttttaattccaactctgttacccactgggtatgtaactgtgatggttaattttatgtgtcaaattgaatgcgccacagggtgcccagattaaacattattttggggtgtgtctgtgaggatgcttctgggtgaaattagcattagaatcagtggactccataaggtagactaccctctccaacgtaggtaggcctcatccaatccacgaaagcctgaacagaacaaaaggtagatgaaggagaaatttacctttttccttctgtctcactgcttgagctggaacatctgatttcatcttctcctgaccttggactgggactttcatcattggctcctccaggtctcaggtccttattctcagactgaactgtaacactggctttcctgggtcaccagcttataaaccacaggttgtgggacttctcagcctccataataacacaagccatttccttataagtatatctttcgtctatttctgtgtgtgtatgtgtattagtccatgttcacactgttgataaagatatacgtgagactgggcaatttacaaaagaaagaggtttaattggactttacagttccacatggctggggaagcctcacaatcatggcagaaggcaaggaggagcaagtaacgtcttatatggatggcagcaggcaaagagagagtgaggaagatgcaaaagtggaaatccccaacaaaagcatcagatctcatgcaacttattcactaccatgagaacagtatgtgggaaaactcccccatgactcaactaccaaccagcaggtccctcccacaacatgtaggaattatgggagtacaattgaagatgagatttgggtggggacacagggccaaaccctatctttctgcacttggcccctgccaaatctcatgtcctcacatttcaaaaccaatcatgccttcccaacagtcccccaaagtcttaactcatttcagccttaactcaaaagtccacagtccaaagtctcatctgagacaaggcaagtcccttctacctatgagcctgtaaaatcaaaagtaagttagttacttcctagatacaatgggggtacgggcactgggtaaatacaacaattccaaatgggagaaattggccaaaacagaggggcaagagggcctatgcaagtccaaaatccagtgggacagtcaaatcttaaagctccaaaatgatctcctttgacttcatgtctcacatccaggccatgctgatgcaagaggtgggttcccatggttttcggcagctctggccctgtggctttgcaaggtacagcttccctcccagctgctttcacagactggcattgagtgtctgcggcttttccaggtgcatggtgcaagctgtcggcagatctaccaccattctggggcctggaggacggtggccctcttctcacagctccactaagcagtgccacagtaaggactctgtgtgagggctctgaccccacatttcccttctgcattgccctagcagaggttctccatgagagccctgctcctgcagtaaacttgtgcctgggcatccaggcatttccatacaccctctgacatctcggcagaagttcccaaaccccaattcttgacttatgtgcacccgcaggctcaacaccatgtggaagctgccaagacttggggcttgcaccatctgaagccacagcctgagctctacattaccccttttagccatggctagagtggctgggacacagggcaccaagtccctaggctgcacacagctcagggaccctgggcccaggccacaaaacccctttttcctcctaggcctccaggcttgtgatgggaggggctgctgtaaagacctctgacatgccctggagacattttccccattgtcttgggaatgaaaatttggctgctcgttacttatgcaaatttctgcagctggcttgaatttctcctcagaaaatgatagttccttttctatcacattgtcaagctgcaaatttttcaaacttttatgctctgtttcccttttaagtgcttttaacagcccctgagtcacctcttgaatgctttgatgcttagaaatttcttctgccagataccctaaatcatctctctcaagttcaaagctctgtaaatctctaggtcagggggaaaatgctgtcagtctctgctaaaacataacaagattacctttgctccagttcataaaaagttcctcatctacatctgagaccacctcagcctggacgttattgtccatatcgctatcaccaaactttcccacattttcctgtcttctgagctctccaaactgttccaacctctgcctgttacccaatttcaaagctgcttccacatttttgggtatcttcttagcagcaccccactctactggtaccaatttactgtattagtctgttttcatgtgctgatgaagatatacccgagactgggcaatttacaaaagaaagaggtttaattggacttacagttccacatcgctggggaagcctcacaatcatggcagaaggcaaggaggagcaagtaatgtcttacatggaaggcagcaggcaaagagagagtgaagaagacgcaaaagcagaaacccctggtaaaaccatcagatcttatgagacttattcattgccatgagagcagtattggggaaactgcacccacgattcaattatctctcactgggtccctcccacaacatgtgggaattatgggagtgcaattcaagatgagatttgggtggggacacagaaccaaaccatatcagtatgtctgtgtgtgtgtctgtgtttgtgtatcctattggttctgtttctgttgagaatcctgattaatacagcgaccttgggcagtttctcaacttctcctaacatcgctttcattattgtaaagcaacactgcagaggtttcctgataattaaacgtgattattattcacaagctagatgcattttaaaaaaaaatcccagaacacacagcagaatgaacaacaatggtataataaagagcaaagagctggaaaaagaatgagaaatcagtaactgattgaaaccaagtagatggagaaaggctttacaaggatggtgatgtttgacttgaacctcaaaggacaagatggagtttggtgggtgaggaaggagaagaggaaaaagagcattccacatgaatgaggcaatatgagcaaaagcagatatttcaaaaataaatagcttttgggagaccaacaaataatactgtggttggagggcagaggaggaataaagggtgagaacagctagaaagatataacccagtcagactacaactgccctagaatagcatgccaaggagtctgtaggcagtggagggctaggtaagtcaattcaggaggattaatcgggttcaaacatggtgtggagagatgaaaaactgcaacaaggatggaaagttcaagcatcttcatgagtctaaatgggagatgatgaggaactgacctaagataatggcagtagcattggaaaggagggggacagatgggctatggggagtaaaagtgaggggtgagtaaaagacgactccatgttttgcaaccttggtgttgagaatgctgatgccatgagctcatccaggaaacacagaacaagaaatgaagctgaccaggtagatgatgagttcagttgtgggatgtgttgaatttcaggtggctgtggaatagtcatagggaagttcataagagaaagttggaaatgtggttctggagctcctgagaggagtcagggttagagatgtatacctcaaagggggtacatttaaagattaaggatatattgtcaaacaaagacaaacttggatttgacctctgcctttaatactatctgtgtggccttgaacaaattatttatcatctccaagccttaatttccttaattgtaaatttgggaaaattatacatccttcaaaggctttgcttattgcataccatctggttgccatttgtcaccatcactgtctaccagaaccatcattgctaaagccattaaagtagatgaacttggctaggaatagagagtaattaagtttaaaaacatgaatgaatcttagggaacaattattaagggatatatgacagaaaagcaaacctgaaaggagcttaagagtattcaaagggggacaggcaaaagaccaagacagcaagacactatgaagggtcaaggggagagaatttcaaggagggaatcatcaaaaatgtcaaatgctaccaagaagtcaagaaggataaagaagaaaagaaaaatatagaacactgaatatagtgctttgaagattatccttgcttagtggaactactacatatgttaggcatagaagccagttgcaaatgcaataggattgaaaatgaacatttcacccagactccaaggagatgtgtatcagataccaaagtgaattgtgagacagatcctattccagaaatgtcaaagcagatataaacagttctagaccttagtcttcttactcactttgaggacataaaaggcttaagttactagacagaaagcagatctatgagaaggattctttaagagagagccttgctgtgaattccatcattccaaaagaggggcgatgctccccttcacctcaataggggtttcactggaagattgtaagtgcttgatcagtgtcctctgtggacagaggcaaataacagactggtatttatgtgtttgactttcacccgagagcctctggcagaaaactgaaggaggcttggctgtactggatggcctgttgttggaggtaaaggttgcatgagtgttctgatggatttgagggcacaaggtggcgtggaactaatttaaattcttcccaagaggagcatctgaggccaatagggagggctttggaaaacagggactgagagagactcagccaaagctggaagaaactgaatcaaccacattaataaagaagagcagaatgttcccagtgagagtccctgaagaacccattaaaacatccaaaagaaaagttagctttttttttttttttttttttttttgagacggagtctctctctgttgcccaggctggaatgcagtggcgcgatctccactcactgtaagctctgcctcccaggttcacgccattctcctgcctcagcctcccaagtagctgggactacaggcacccgccaccatgtccggctatttttttttttgtatttttagtagatacggggtttcattgtgctggccagaatggtctcgatctcctgacctcatgatccgcccgcctcagcctcccaaagtgctgggattgcaggcgtgagccaccgcacccggtcccagaaagttagctttaaaatcacagttcttggccgagagagtttgaagccaccctataacagaatagtcaaggaaggactttccacctctcctttctcatcatcctgccccacccacctcatccccattccaatcttggagggatcaaaacagcggggaggagggagtgagcaggagagaagtcatcaaccctccccttgtcctgcagagtaggggactcaccacatgctacattgggatctagctaggtgtggaaatggaactcccattttgaatgactattatgtaggactagatatgatgatggcaatttttatctagaagagtccacagacttttttactatcttaggagggaccagaaaaatcttgggattgctgaggtgccatccagtgccaagaaaggaacttccagccttacataaacctcaaaggatgggggaagacaatttttctaaaaaaactgataaaaccccataattcttgtgtgttccatgtaccagttacccaatggtataacaaatgatcaggttgaagaagtggaggcttcaaggacagtcattatttattattattttttagcaatttggcagagaaagaaaggcaatgtggtttggtgagatgacagagatgactggaggctcttttaggataggaggaacctgggcctggctgtgggctgaaagaagagagactatagatagggtaaaacaaaaaatccacgaaacagtaggaacagaacactgacgaggcaaggtcacaaagagaaagagaagacaaagacaagggactatcattgatttttagaaaagaaaggagacttcattttttggaaagttgaggaaaacaggagagaagatgaggaaagatatacgtcattttggtctagaaggaaaagaaataacggagtttacagtgagtgactttgaccatagggaaggggtaggagggaagctccccttagaatgagggcagtgggtggtatttgttactctggagaccagaactaggaggactatgtgcaagctggggagacattaatttgggctcaataacttgtcaaaaatgagcactaggccaggtgcagtggctcacacctgtaatcccagcactttgggaggccaaagcgggtggatcacgaggtcaggagatggagaccatcctggctaacacggtgaaaccccatctctactaaaaattcaaaaaattaaccaggcatgatggcacgtgcctgtagtcccagctactcgggaggctgaggcaggagaatcacttgaacccgggaggcagaggtttcagtgagccaagatcgcgccactgcactccagccttggtgacagagtgagactctgtctcaaaaaaaaaaagccctagcggacagtggaattggcctttttctaaatttacaccccatcatcaacaaagggttccagttggggatggagaagcaactgttggatgctgtggagagggtttctgcatcaaaggggaggggaagctgatgacctccaagacctttagtgtccaggattcacctataattctatattttgtagggttttccacatcaaaaattcatgtcactgttactgaatacaataaaaaggaaggcctgtgaggaccggaagagaaaatgtaaagaaaagattgcagatgttatacaatgccttgattttctaagtagaaaattatctatttgtagcgaaggaactagctggagcttgagttagagtctgtctccaaggtgcagtactctatatgtatccatagtttggctgttgattaaattggaactatcactatgttccgggacatttcatatttatgcatgagctaaaaggtagctatgatcgggaacgtctccagaaacccttgtggcctttccactgcttggaggcaaatgggaactagctgacgagagcaaagcacgttagccaatgtgccctgtattcggaacacaaaacagacaaaagctcccaaaccctctatttcagacatcaggctgaattctacaaatcaatgcaatcgggaatgatcataccagattttatatccttttctcataagacaatgaagagccacaaaaacttagaattattcaacaagatagctatattagtttttcagttgtttggcttttgtttatttgttttttgagacaaagtctcgctcttttgcccaggcaggagtggcgcaatctctgctcactgcagcctcaacctctggggctcaagcgatcctcccacctcagcctgccaagtagctggaactacaggtgtgctccaccatgcccagttaattttttgtagagatggggtttcaccatgttgcccaggttggtcttaaactcctgtgctcaagtgatccacctgcctcagctcccaaactgttgggatcacaggcatgagccaccatgcccggccctatactgtttctttaaaataaaaactgtatattcctagaattaacatctattgaaacgataaaatatgccagcaccaacacataccatccatctcaaagaaatctgcccacagatgcaatgtaaacaggccttataatccaattaaaatttagatttacaaagagttgtctgtctattgcaaatcactagtcattttaccacagtatgtttcgtaagagataaaagccactagaataatatgcaatatttaatattctgggtcaaagttcagcacctaagatcccctgacatctttacacataaacaatattaaacgtctgtatggatagcctggccaacagggcaataacccgtctctactaaaaatataaaaactagccgggcatggtggcatgtgcctgtagtcccagctactcgggaggatgaggcaggagaatcgcttgaacctgggaggtggaggttgcagtgagccgagatcacgccactgcactccagcctgggtgacacagcaagagtctgtctcaaaaaaaaaaaaaataagttagtatgaagggtcacatctccagcctgggtgacacagcaagagtccgtctcaaaaaaaaaaaaaaataagttagtatgaagggtcacatctgacctaagtgttactgtctgcaggtacttgagcttagcacactgcctggtacatagtaagttagcttattgaataaatgactgcatgagtgaaagaatggatggattttgttagcagtagctcaaaaactagtttgtgaggaggtgtggtctttgtcctgactgtgagcatcttccagtgtttccattaaccttctggtttcctagcatcaccagcctcaggacaaagcagcagggccatcaggtctctttaacccaaatcaacatgggcacggagagagggaagcatttaccaagggctgggactcctgaacactgtcacttttagaagtctgattggttcttctacaggtggtttagtttaatcttctagagattccctccagagaagagtggatatcttcaaaggagccttaattccctctcacctccaccacagcaacaaaagttaagagtggaagaaagcagtagtaatcgctttctggttccaaagagcaccaaaagcagatcttgatgtcatctgcctccaattaagccccacaaatgaagctacatggctgagtccagctgcaatccactaggaggtatatttcagctgaggtgtcattccccagcatcgttcactgggtaataaggaacacagtttcgaatgtgctttgacatttattgtctcatttgaggtccgttacaacacaggaaaaaaatgtgtttcagggaataggaagcaggcttggagatgtagagaccacacagaaagtaggacatagagcctggatgagactgtgtcttctcaacacaatcccactattccaatactgttcctactattccattaggttggtgcaaaagtaatcacttttttttgccattacttttaatggcagaagccgtgattacttttgcagcaacctaataggttctagccctattttcttatcacccagaattagggaaagtgatcagaaccccatggtgaatggtacctgatacagcttctgtcttatttgggacatgagtcccaggaaaatggttagaatagaatatttctagaaatatttaccaagcagatcttgggtacccaacaccatggtgatccataagagaagctgaggaaatgtccattctagaatcacatacccaggaagaacaacactggactacaggcacgtctgtctggtgcagggagaagcagaactggtatttcctggagatcgggcactacacatgcacacacgtgcacaggcacacatacacgtgcacgggcatacacacacgcacacacacacgcacacgcacgctgcgtctcaaaagtcttcctgcagttttgagctttaatgacttcagaattataaacacagcaaacatacaaaaatctgaaagcttgtttacatttcttctacagttacttagttttatgaatattaaataacacatttttaaattttaatgttttgtttcagttcatatttaccatcttcaatcagaggggcaaaaacattttccagtataaaaatatgatacccctacaatccacacacaaatgacccatatcacataacatctcatactaagcctgcagtcaagtaaaagtaaatttcacacgtgctgctgtgaaaacgacattgctcctaagtaagcttgcaaggctggcttttttctttctatctttctttcacaccctagagctcttctttttgtttatatgaattaaagtttatcttgttagatacaatccaccctgttagaaccttttcggatcctcattctacctttgaccacatcagctctcctccctgatggttcgaatccacacggctttaatgttttctaaaggacattttttttttgttttttgagacggagtcttgatctgttgcctaggctggagtgcagtggtgtgatcttggctcactgcaacctccgcctcccgggttcaagtgattctcctgcctcagcctcccgagtagctgggactacaggtgcatgccaccacacccagctaattttttgtatttttagtagagatggggtttcactgtgttagccaggatggtcttgatctcctgacttcgtgattcttctgacctcgtgatccacccgccttggcctcccaaagtgctgggattacaggcatgagccactgcgcctggcctcaaaaggacacttctaactatgctaaaccatatcaagtccaaagcagaaccttgtggtgtgaaacctgttcactctcagcaaacaaacacaatcccttccttcaggggcctgatgggacaatcctaatagagatctcctccggcacatttgacatcagcctataaatcagtaccttttggacagagaagataaatcaattaaaaatacagccacctataccatttactatatattttcatcttagtccaagggacttcaaga

SEQ ID NO: 371 - DNA, 446906 bp, Homo sapiens
  source 1..446906: mol_type = genomic DNA
atggagaaacagctggaaaataacaaggagatcaaaggagggttttatgggctttttttttttttaagtgcaagacattacagcatgtttacatgctgataggaagatccagtagaactgaaggaattcatgttggaaagaaatgggcaagagaaaaatctaggttagacaacagaaaacaagatccagtgcacaagtggaggacttaacagtagaaaagagtagacacagtatatctgaaagggactaaaggtacaatatactggtacagatattatttagtggtagaaaagaaagtccttttctacttgcttctttttctccagtgatagggaacttcaaaaagcccatggacatggaattgaaagataaaaactatgaagtatttcttaccataagccccatcaagttcaagatgcttttgtaaccaatgaaatcagccatggtctatcgctaaagaactgagggtcttgggaatttaaccatgtcactggagacttttttacagtattcactgaaaagaaaatgggcaccttttacagattttttaagattgggaaacaaaaagaagttagaagaggcaaattaggatgttaattgtgccccatttaaatcccaaaattgttctttgatgagaggaatgagcaggagcactttcatggaggagaaggactctctggtgaagctttccgaggcatttttctgcaaagctttgactaacattctcaaaacactttaataatgttatcattctttggcattccagaaagtcaacaagcaaaatatcttaagcatccccaaaaaactgattccatgaacttggttcttgactggtccatttttgctttgactggaccaattccactgcttagtagccattgctttgattgtactttgtattcaggatcatattagtgaagccactttcaacctcctgttaacaatacttcagagaacttcttcaggatcttaatctcactgctttaaaatttccatcaaaagcttcgctcttatctgcagctgatctgggtgtaatgattttgaccctagttgagtacaaagtttactcaactttaatttttccatcagaattgtgtaagctgggccagctgagatggctatggtgttgaaaattgtttctgctgttaatcatcaatcctcttcaatttgtgcaaatgagattaatttttttcctcacaaattgatggggttggtttgccaccgtgggcttcatctccaacattgtctcatcctttctcaaaatgagatatccatttttaaactgctgatttctttgggggttttcccccataaacttttcataaagcatcaataatttcatcattcttttatgcaagcttcaccataaatttgttgttctgacttcaattttagcaggattcgtgttacactgacaggagctctttttaaattgatttcttatccttgttagtgtcttcaactagattccattcagtcatgttacaataagttagtacaagtttattttggtacaaaattttgaaatccatgcatagtttttttgtaatatgcatttcccacgaacatttgaagacaaactgaataacaaaaaggtcatcaactgagaacaatgggaaggaaagagtagctgagatatgaagaaaagggagaaagtgagaaaatgtgtaggacattgatttctggcaagatactctaggtagcagcagcagagagtgaaatagcatcggaaaacatcaaacgcagtcattaagtggccaaagaatggggaacatctgtggggccaggtgtgcacatataagggggagaggtgggctccaaataagaaaaaaaaaattaagaaaaaagaggcaggagttgttttagacaatttctacctacttcaaatccagctgcaaagctagtagaagaaaggaaataactaaaatcagaaaagaactaaatgaaattgagacccaaaagtccattaaaaagatcaataaaatcaggagttcgttctttgaaaaaataagcaaaattgatagatcattagcttgattaacagagacgatccaaataagcacaatcagaaatgaaaaagatgatattacaactgatcccacagaaatataaaagatcctcagagactattataaacatctctatgcacacaaattagaaaatctagaggaattcataaatttctggaaatacacaaactcccaagattgaatcaggaggaaagtggaaagagacaaataataagtgtaaaaatggaatcagtaataagaaacctatcaaccaaaaagagccctgaaccagatggattcacagccaaattctaccacacatagaaatagcaaatgataccaatcctactgaaaaatcgaggaggggcttgtccctaactcattctttgaagccagcatcagcctgatatcaaaatctggaagagacacaatgaaccaagaaaacttcaggccaatatccttgatgaacatggacataaacatccttaacaaaatactagcaaacaaaattcagcagcacgtcaaaaagttaattcatcttaatgaagaaggctttatttctgggatgcaagatcggttcaacatatgcaaatcaataaatgtgatttaccacatgaaagaattaaaaccaaaaaccatacaatcattagagtaggtgcagaaaaagccttcaataaaatccaatatccctcatgacaaaaaaccctcaacagactagcatcaaaggaacatacctcaaaatattaagagccatctatggcaaacccacagccaacatcatgctgaatgagcaaaagctggaatcctccccttgagaactggaacaagacaaagatgtccactctcaccacttctattcaacaatgtaatagaagtcctagccatggccaggtgtggtggcttatgcctgtaatcccagtactttgggaggcagaggcatgcagatcacctgaggtcaggagtttgataccaatctggccaacatggcagaatcccatctgtactaaaaacacaaaaattagctgggcatggtggctcatgctcgaatcccagctactccggaggctgaggcaggagaattgcttgaacccgggaggtggaggttgcagtgagccaagattgtgccactgcactccaacctaggtgacagagtaagactccatctcaaaaacaaaaaaaaaaaaaaaaaaaaaaggaagtcctagccagagcaaaattggaaaagaagtcaaactgtctctttttgccaatgttatgactcaatacatagaaaaccctaaagacactgccaaaaggcttctggaactgataaatgacacaaagtttcaggatacaaaataaatgtacaaaaatcagtaatatttttatacatcaatagtgttctagctgagaaccaaatcaagaacacaatcgcattttcaacagccacaaaaaataaatactggctggtcgcggtggctcacgcatgtaatcccagcactttgggaggctgagacgggtggatctcctgaggtcaggagttcgagaccagcctgaccaacatggtgaaaccccatctctactaaaaatacaaaaattagccgggcgtgatggtgggtgcctgtaatcctagctactcggggagccgaggcaggagaatcgcttgaacccgggaggcagatgttgcagtgagccaagatcacaccactgcattccagcctgggtgacagagcaagacttcatctcaagaaaaaaaaaaagtgtaactgttattttattttcctatcccctaccttatatccttttagtggcttttagttgcatctagggtaaaaacttagatcattactgttagcatagtcaacaaagctattgagttttgcctgtctatagccagtgaagttgcagtgagccaagatcgtgccattgcactccagcctaagcaacaagagaagaaaaaaggaaaattaaatatctaagaatttctctaacaaaggggtgaaagatctctacaatgagaactacaaaacactactgaaagaaatcagagatgacacaaataaaatggaaaaatattccatgctcatggactggaagaattaataaaattaaaatggccatattgcccagtgcaattttcagattcaacactatccctataaaaataccaatatcatttttcacaaattagaaaaacctattctaaaattagttgggaatgaaaacagagccaaagcaattctaagcaaaaagaacaaagtctgaggcatcacattgcctgacttcaaactatactacaaggccacagtaatcaaaacactatggtactagaaaaaaaaaaaagacatgtagaccagtggaacagaatagagaacccacaaataaacctgcacacctacaaccatctgatctttgacaaaatcaacaaaagtaaccaataaggaaaggaccccctgttcaataaatggtgttggaataacaggctagccatatgcagaagaatgaaactggactgctacctctccccatatacaaaaattactcaagatgtattaaagatttaaatgtaaaacccaaaactataaaaatcctagaagaaaacccaggaataccctttttgacataggttttggcaaataatttatgactctttccaaaaacaattgcaacaaaaacaaaaatagacaaatggaacctaattaaactaaacagcttctgcacagcagaagatattaccaatagagtaaacagacagcctacacaatcggagaaaatatttacaaactatgcacctgacaaagttcttatatccagaatctatacagaatttaaactaatccacaagcaaaacccaaaaaatccaataataaatgagcaaaggacatgaacagacacttctcaaaagaagacatgtatatggccaacaaacatgaaaaattactcaacaacatcactaatcatcagagaaatgccaatcgaaaccacaatgtgatatcacctcacaccagtcaagagtggtgattattaaataacaaatgctggtgaggctgtggagaaaaggacatgcttacaaattgttagtgggaatgtaaactcccactatttagttcagtccctgtggaaagcagtttggagatttctcaaagaacttaaaacagaactagcattcaaccaagcaatcccactactgagtatataccaaaaggaaaataattcatcctgtcaaaaagacacatatatgtattcattgcagcactattcattagcaaagacacagaatcaacctaagtacccattaacaatagactggataaacaaaatatggtacatatataccatggaatactatgcagccccataaaaaagaatgaaatcatgttctttgcagcaatacggatggagttggaggccattatcctaagcaagttaacccaagagcagaaaaccaaataccacatattgtcatttataagtgggagttaaactttgaatacacatgaatgtaaagaggggaaccacagatactgggacagtagatgggggaaggagggaggaaggtataaactgaagaaccacgtgttgggtactaagcttactgcctgggtgatgggatcattggaactccacacctcaacatcatttaatttactatgtaacaaacctgcatgtgtatcctgtaatctataataaaaattgaaattataaaaaaattaaagagaacatcaagatggaatagataaatcttgctcattatggatatgaaaatattaaaaagtaataaaatattttttctgaataaaggaggaaagcatttatcacctaaaagtattagttctttcatttgaatacctcaaaatgaaaaaatatagtcacactctgagtcaacaatcacactgactctgtaggtccatgaagtaggatccatgaatactatgacatttaattacacagtaaagcattctgtataggaaagattaataatgtaagttaattacctaagaaaaataatagtaacaattacagaattatattttccttcagtgtgcttgagagtataataattggaaagacttactcatttaatctgaatagttctattatttattctctatggtggtttttatttttagatgcttcgtttttatggaaggttttaattaattccttttattgtttcattaatcttttttatatatattttttattatactttaagttctagggtacatgtgcacaacatgcaggtttgttacgtttgtatacatgtgccatgttggtgtgctgcacccattaactcatcatttacattaggtatatctcctaatgctatccctcccccctcccccgaccccacacactggggcctgttgttttattaatctttctcttaactacagttttagatgacagtgagattcaaatctttgagtagtttgagggtttcctttttcctttaaaacttctaaagcacataaattccaacatgaaagatccaaaaaaagcaatataaaaaaaaaacagcttagcaagcttggaatttctttgggttaaaggaaccataacattgttattttcaaactgggttcttgcatcactttgttgggaaagaggatctccaaaacatgcacataacacaaatacacacacacacacacaaactttatttcaaactcaaatttagggaaagtctttgcatggcatttagatttcattgtaaggaaatgttctcatagttaattttcttttgtttttatttgaatttaaaatgaactttctatttgaaatatcttgcattttgctaatttgatgttgaacagaatattttcaaagtgattaactcaacatattcttctaagttaaaacccttctgactttcaaaaaaattcttctttattttttcataagctccttttacatattttgctgagctacattcacactgagtttctggaggaatgtcactatgaacacaagatacacctgcatatgcccatttggatttcttcgtgtgaagcagaagccctctggccccaccagtcaagaccacagctagatggctacttttttgaatgagctgaactcagtagaaaggaaagacaaaagggtcattgctctacagtgttcattcctgctacgatcaatcccttttttttctttgagacagagtctcgctctgtcgcacaggctggagtgcagtggtgagatctcggctcacagcaagctctgcctcctgggttcacgccattctcctgcctcagcctcccgagtagctggggctacaggcacccaccaccatgccccgctaatttttttttttttttttttttgtatttttagtagagatggggtttcaccatgttagccaggatggtctcgatctcctgacctcgtgatctgcccacctcggcctcccaaagtgctgggattacaggcatgagccaccgtgcccggccgatcaatcccttctatctatgttgctatacccaagtaactgcataatctgagggctgagaaccagggctaagtaagataaaggcttgggagcctaggagttacagaaaagggcctggattggaacaattagccaatctaaggtcatataatgtcaaaagctcagtctttgaagttagacctatgtttaagatctagccacacaatttagtgggtgtttaatcttcaaaaaatgtacttagtttctctggcctgaactatacaatgggaataataatggccctacctcaaaggcttgtaaggatcaaaagatatgatgatgtaaggcgctatacagtttgaatgtttgtcccctccaaaactcatgttgcaatttaattgccactataacagtattaagagatgggacttttaagaggtgataaggccatgaggtcttcactctcatgggtggggttggtaactcttggcctctcttgcccttccaccttccactattggatgacaaagcaagaaggcccttgtctaatgccagcccctcaatcttggacttcccagcctccagaactgtgagaaaattaattttgttcattataaattacccagtctgtggtattttgttatagcagcgcagagccaataagacataaggcaactagcatacaaagcatgagttaagctttcattgattcagtttatagacgaggaaatggatctcagtgaatgctcaaaaaagtcccatgaggtaggctccattgtaaccatctctgttttatagataaagaaaccaaagcacagagagtttgagtagcttgctcaagaatatagccaggcagggccagagatataatctaaccccaggcaatctggctttggaatctctcttcctaaccagagaaagatagattggataagcaaaatatccagttttttctgttcttggattggtttgctacacaacactgcctttcatagttctttgttgaaatgagcgttaagatagtgattgaaattagtcactagatggaaaagtggaagacatagcaacaatgatgcccgacaaaatctagcattaggatccaaacaggcagaacttgctcttatgtccgatatgcccatagaaagatagacatcagacactaggacaagaaccaggaaagatgaagaatgtaggagggaaccagctgctgtctggtgtctagtgttcatagagcaacgcttcaaagcagggtatagagatgtagctaacacttccactacaggctatagagtgccagttctccccttcattgccctaaactctaagtttaattggtgagggaaataacatggtgcacaaaagacaaccacagaccataaagaaagaaaaatcaaagcaagaacaagcaccatctatttccagggcacctcccataaagtaggatggatttgttgagacctctctcataatcagcagggtattttatacttttttcctattgatggacacttgatgatggttatagacttagaatatcagtctggatacactttgctgattttgcttaacagaagcatgactcatggttccagattaaacagaaaacattatgctggtcaaaggcttctttttttagacctctaagggtctgcacccttttgcataacctctacttaaacggccctctccttaaactgggcggtagcttgacattgtaaatttgtaattaaacttgcttatactataattctgacgtctcaaaagtttatttccaacaatggactactggagatatgataaaacaaccctacgattaggttgtatctggtttccctcatattgtaaagtaggtgttgagattcttccatgattacctgcaaagggcctagagaaacagcagcccttcaaacagatcatctttatctagtttgtatttatatcaatgctgtttttcatcctctcctttcctcttctctttcctcttctcctcctttcttctcctcctttcttctgttctctcctttcctcatgcctttccagatgggactcactaagaccatcaacctattcccacatgttttttcctgttcctgatagggcaaacaagctgtggccaatcagcaccaataccagggacagctcctttccctagggcttccccgtcaggttaggttcccaattgtgatttttattgcaaggctgacatttgtagctagaagattcttcaatctcccaccctcattgtagtttttaataccagagtctggctgaagcattaagtgtatctgctgcaatattttcttagctctcaaggtctagtggtagataaatggagacagcaaaggctcacaggaagcatattttatcacagtccagtctaaagtcagcattcacaaatcagactctactggcatttgtgaagggccaagtctcagatggatgcttaggtacattcggaatcatggagggtatggtatgggtgaggaataatataacctctgcatcagtatttcagggtcccttctggcctgagttgaacttgctaggctgggctcctgaaacacctctttgcttttagggcctcagcaagctctgttgatgcctccacaagctctcacgagtggcagcactgttcagacagacctaacaagctttaaatggcaattctagtataattttagcacatttcatgacatagcccatgtgctctgggatattttagacaatcgcttggagttccaactcaggttcatatgttctctgtaggcatccacagagactgagttggaatatggttcagagacaaggactgttacattttggggagtcagcgtgccctggaggaaacttatagagccaattaagtctcttcagggaagccacataaggtactcttgtctgggaaagcaggttcccccagatctaatacagagtactgatttattacagagtagtccctatattctccaacctacctgatctaactcacagagaaatttatgacctatattaatggaatttcaagcacatatttttcccatgtgttatcagagtaataaaacatttgaggattcttttcatatttctcatgtgggggtctagcacctcagcatatatttctaggaagaaataagcaagaacagttggtatgagttttctaagctaaaaaaaactttctacaacaaataactttctgagattcaatatgttcagctgtgactatgccagaaagttctaagtaggcagcttgacacttgcccttaagttcagtgagcatgtttcaaggaattcagaaaatgagaagctgggtacctcagctcaagagagctaaatgagtttgtagttataggctcaaagacactgggctgctagtggtatgagtgtagctataagagtgggccatctttaagttgaggagacacatttatcaaactcttgaactctaaggagccactggattgtcctgacctacataaatgtgattttagaaagagttaacgttgctagtggatcaagacattttgcaggaaactgtgtcaactccttgaggggaggcctttgtctctgttgtttactattgaatcactagatcctataacatgcctggcaagaatatgtattaacggattggtaagggaatccagaacacaattaaaatgcccaataagcttgacatatatggccaaaggaggcttaaagcttcaggagagccagatatggcctgtttctcaggatactttccgagtattaagatcattcaggaagcttgttaaactgaatattctcagacctctgcccaaagcttctgattcaatatatctcctagagtggggctttagaatttctttttagcaagcctccaatgaggtgaatttaaagtggtttgtaatttgagatgtaccaaactaatctctccaaaaatgtgactggtccctagtcctagaactaggagcataattgcattggtcttcataggaaataaatacagagcactggctagctatcttcgggccatctctagaatagccttgttccctgggaacacccagaagcccaagtctaaactcaatcaaatactcagagaacctatattgaagggagtgcttcaaatagaggtagaaagtgtgaatttttctaaacatttcagttttaaggcagtcatttcgatggtggaagtaatagatagtatcttattccatcctgtgtctcacaggacaatttatctacaatttctaggcattcataataatattatgctagtttcatatgtacacgttctcttgatgatgagagcttggtctgggcttcattatatccaacaaaattaactgaaatgtaatagatattttacaagtattccagaggtgccattttgactgtatatggcagaagacacacattaccctagtactaaattcacccacttctgtttgatgagagagcagaagtaaaacgtgtctaggaaattttaggagcgacccagaagctacagagatcccagtagatgagaaagacctctcttttcaagaactttttttttcctatggaaatggaatttcctgatttttcttcaacttttattttaggttcctggggtacatgtgcatatttgttacatgggtaaattgcgtgtcactgagtttggtgtacaaataaatgatcctgtcacccaggttgtgagcatagtacctgaaaagtagttttcaacccttactcccctcctacccgtaccccaggtggtcttcagtatctattgttcccatattatgtccatgtgtactcgatgtttagcccccagttataagtgagaacctgtggtatttgggcttctgttcctgtactaattcacttaggataatggcttccagcttcatccatgttgttgcaaaggacatgatttcattctttttatggctatacagtagtccatggcacatatgtatgacactttctttatctagtcaaccattgatgggcatctcagttgattcaatgtctttgttattgtgaatagtgctccagtgaacatacaagtgcatgtgtcttttggtagaaccatttattttcttttaggtatataaccagtaatggaatcactgggtctaattgtagttctgttttaagttttttgagaaatctccaaactgctcagcccctgtggaaaacagtttggagatttctcaaagaacttaaaacaagcttgcattcccaccaacagtgtataagcgttctcttttctccacactcaccaacatctgttttttttttctttctttttttttttttttggctttttattaatagccattctgacggatgtgagatggcatctcattgtggttttgattttcatttctctgatgattagtgatgttgagcagtttttcatgtatttgttggccatgcgtatgtcttattttgagaagtatctgtttagtcctttgcccatttttaattgaattttttgttttttacttgttcaattgtttaagttccttacagactatgaatgttagacttttgttagatgcacagcttacaaatattttcctccattctgtaggttgtctgtttattctgttagcttcttttgctgtgtagaagttctttagttcagttatgtcccacttgtctatttttgtttttgttgcagttgcttttggagacttaatcacaaattttttgccaaggtagatgtctacaagggtatttcctaggttttcttctaggatttttataattttaagtcttatatttgaatcttgagttatttttgtatatgataagaggtaggggtccagtttcattcttctgcatatggttagccagtcatcccagcaccatgtattaaaaggagagtcctttcctctttgcttgttattatcaacattgttgaagatcagatgcttgtaggtgtgtgattttattcctggtttgtctatcctgttacactgctttgtatttttatatcaataccatactgttttggttactgtagccttgcagtatggtttaaaatcaggtagtgtgatgccttggattgctttgcctaattaggttctgttttggttttatatgaattaaaatagatgtctctaattaagtgaaaaataacattgttagttcataaattgctttaggcagtatcgttattttaatgatattgattcttccaatccatgagcgtgagatgcttttccattggtttttatcatctatgatttctttcagcagtgttttatagtcctccttgtagaagtctttcacttccccggttagacatattccaagtattttgcatgtgtgactatcgtaaatagaattgtcttcctgatttggctctcaacttgaatgttatttgtgtgtagaaatgctacttatttttgtacattaatttttgtatcctgagactttactgaagtcatgtatttgttccaggagccttttggtggagtttttggggttttctaggtatagaattatatcatcagtaaagacagataatttaacttctttttttttcctatttgaatgccttttatttccttttcttgcctgattgctctggctaggacctcctttagaaatctttactgaagcattacatctgcagctggacaaggcatggcatagtcacatatgagttctttctgtaggaagccattaacttattataaggtaggaactgtacagcacggtgattgtaatcctagactttttactcaataaactcctaggagattccagaaataatacctagggaaagaagtttagtctgcagcaattgtactaataattttaacattttcaatgtacccagtgataactcctcgttatatcaaaattacttgaggtaatggtgtctttgaatgctttcataactcagtcgggttccaacatgaagcctcctataaccttgcacatgaagagaaaggaaaagaactagtggagatgtgatttttggaacctgactaaatacagagaaggtctcggccagagcagctgaacatatgtaatattttagtatacggtgtgtagaggtcaagtgatatcctgacaaacttgactgctgtttgatgtttttgtgagcccagaaagagtaagtacatggatctagagctcaagaataaagccaggaatccatttttttgttgttgttgttctgcaaattgctttattctcttaactcaaatgtgtatattcctgaaaagccacattttatttatttttttatttttctggacttagaggtacaagtgcagttgtgttacatgcatatcttagatagttgtgaaatctgagcttttagtacactcatgatcctgatagtgtacattgtaccccacaggtgacattttatctctcacctctcttccaatcttccaacatctggtgtttccaatatctattattccactccatatgtccatatatacccattgtttagctcccacttataagtgataacatacagtttttaattttctgtttctgcagaggtcgaattaattccttatttaatccacaagacaaagatcaacttctaaaatctgatggggccaagaaatttcctgaaaatcacatgtggatttggagggcctatcaatcaattatcgctacaataatgctgcataacaaaatctactaaacattattggcaaacaacaataagcacttatttagctcttgcagtgcaggtctactagaggtagctaatcccagctggacttgactgaatacttaccccccaccccacacccatatgtctctcagctttctcttaagactaacagactagcctgggaatgttattctcatggattgcagaagcacaagacagcaagtcgatacacacaaagtctctagggcctaggttcataactggcaccctagacttgcatctaattctattggccaaaacaaggcttgtgaccaatccccaaagtcaagggtgaggaaataaactgtagccttttaatgagggaaactgaacagtcacatggcaaagaagatgaatataggggagagaatggaattgtgatctgccacagaggtggtcaacaagcagaccaaataacaagcagacgataaatgggacttctgtacagatatgaagatgaccagcagacccgtcatcttaggccaaggctacttctgcaaagtgtgctccctttatgtgatagttggcctttgttactattgaatccacaataagaataatgaatattgaatcaaatctactctggtcaatacataccttctgaaatagctctacaaaaatgaaatgaatactcattcttccccttaaatactattctttagatttactaagcatatcactaatacttatgaataagtaaaaatatccaaagtagtttataaatcccatattatttggacacagagtggtgctcactagttattccataataactaatggggaagagataacctctcatagtctttaccaagctttaatgatttgaccatctgggtgtagatagcatgaacttcaaaatttctcttcagagatttctaaatgtattaaattctcagtaggcttggcagtaattgtagattgtgttatgactatcaagtgagaaagctaggtccacccatctgctacttaggaattacaataacattaaaaggaattcgataaggctttggcaacttaactatgtccttgcattttgaagagggtgtgaatccattcaaattaccctccctggtgatagtgaaaatattttttagaatcagagagattaacacaacatttgccatttatttgatttttggatcatacttacaagattgtcatctgtcttcacaaactttcttgtttgtttttcaagtgtcttgccagagtattttatctcagaaaatttaaccacatgcaactcagcagctgttcttagttattatcttcaggttaaatcagtacacacactataaactaaaacttgccctgcatgttttgtttttaaagttagcaagtgcattcacagctttgagacttgtattccctctcccaacccccagcatttccagcattctccaaatcaggatgtttcaaggagtatcaataagtcatcatacttgaaaaagtgaatatatttttcaaaatataaacaccattaagaaaaagtaagatgcatattactttggttgcctggattgtcaatgactgctactggaaaatgtatctgcctatttaaccatagtctcacaaaagcatataaataaataaacacatttagacatgattgaataaaaccccattcactagataatcccctttatttttctaaataaggtatgccatctagcttccagggaaagaaataatactgcaaaagattcttcctctaagatgactgctaggcaaatgtaagctttttccatttaggaaaatcatgtgagggcttttaagacattttaatacttttcaaagtgagaaattagggcaccaaaagtttccactgataggacattgtgaatgcacaactggatgtcatagctataacatgaactcttcacctcatgtagctgctgcctcgaccagtgactttcaaacatttctgacaatgacacacagcaaaatacacatttaacatcacaactcagtacgcacatactcataacctcaaacatacacacatacatgaatcaacagttttaggaaatggtgcttatcttcagtatataagatataccctgatactttgcttctgttctatttcattatgttttcaaatgctgatggtgatgcactgaaaatgattgcataaactactaacagactgtgatgtactgtgtaaactttggagaagttgaaacttaagagatgtccaagttcagatttcctggaaatcagaccccatggtaaggttttagtgttggggggctttatctcaggaaagcaagagtaaaaggaagagtgagtcaggcaaaacgaagatcacatataaaatggtgcattattcagctggccacagctttataagaacaaacagctggttgctcagtcacaagggagggacatccccagagtggccacatggcaccattacatcctagaagagtcctttgtagagggtggatgaggaagggcaagctattgactactagctccttctcatctgcagtctctcattggtcaaacttcatcccaactcaactcctttccccactatttctagattgcatcactcagtccttctgggcagagactcctcaaatgaggtgagacctgtgccaaggctcaccttggaaacacctgcccttggaaacaatgccaatggccaggttttaccctcaagggaggctgagacaacctaagattagggactggtcatacagctagtgcttatgaccttagaaatgaccttagaaatgacacaacctgtcactgttctctagctaggaaaagggacaagcagctaaggctcaggagtcacgtagggctgagcacatttggggatgcccaaaattagggccactatttgggaaaaagcacagatcttggagttgaatgctcctagattcaaatcctcacatctctacttcccagctatgtgaaatctgtgtaagctgctttaccgctttgatggatgatactaatatccttgcagagctgctataaaagctagagataacatgatttcctccagaaaggtctttcctttcctagatttatatccagtttattatagtttatatttttatgctagcattttttttcctttcttctgttaattaatgcaattaaataggcaaacttttatttctggtatcaaaggagaagttttcagtttcaccattaagttttatttctgtaataaggttttgttagttgcttcttttcaagttaagttcttttttatttctagtgttctgaatttgtatcatgaatgtattttgagttttatgaaatgattttcaacatctattgacatattgctttttgcttttatctgtcaatatggagaaaactattgacttttctaatgtttcttaaaaacttttcattcctgcaataaacacaacttcagtataatgcattattcttttcatatattgccgggttggctttgagaatactttgcttaagattatttttatctatgctcctaaataagatttgccttgaattttcctttcttgtactgtccacatttggtttttggtatcaaggttacaacagcctcataaaatgaatggccaggcatggtggctcatgctttaatcccagcactttgagaggctgaagtgggaagttcaattgagcccaggagttcaagacctgcctcaacatggcaaaaactcatctctacaaaaaatacaaaaattagccagacacagcagcatgcacctgtattcccagctactctggaggcagaggcaggatcatcaattgatcccgggaggttgaggctgcagtgagcagtgatcatgacactgcacaccagcctgggcaacagaatgagactgtgtctgaaaaaataaataaataaataaaataaaatgaattctctttcactctaaaatgttccctcttttactctattttgaaattgtttctataaagttgaaattatttgctctctgaatgtttggttggacagcatggtaaattatctaggcctggagttatcctctgtgggaagatatttaactacctgttcaatttctttaatgattatgacctttcatgtgtcctattttttaaaatcaatttttgtagcattttcctaggaatttgtccatttcatataaattttcaaagtaactggcatgaaattattcattctatcattttattttctccttaatagtggcagctatattctcttttttttcctcatattatttacttgggatagctctttttccatgatcaaagatttgtcaaatttattagtcattccaaacaaccaacttttgtttttgttcatcctttctactctatgcttattttccattatattaatttctgctcatatcttcattatttcctttgtcccagattctctgcatttacttcagttttcttttcctatcctcttaagatggctgtatcagtcattaattttcaatctttgtttttgttttaatataatcattagaagctagaattctttctaattgctgctttatctgcatcttataagttttaacggtagtattttcaccatcattccattctaaatattttctggctttactatgattattttctttgacttgtggtttatgtagaaatgtatttcttaacttcccaatacatgaagttttattggttatctgttggttattgatttctagtttaactgaactgtgttcaaagaatgacaggtaactttgaaaattattgagactcgctatatggtcaatttttgcaaatgtcctttgtgttcttgtacagaatttgtattctgcattgtgtgagtacaatactacacaagtctattaggatatatttggtaaattgtattgtttaaatcttcattttccttactgattccttatctgctccatcacttctcttctgatagatatcttaaaacctcctttataattgagaatttatttatttatctttaatttctgtccatttttgtttcattaattttgagatatgctattaggttctatttatcttgcctttttctgattccttttttctctcatttcttgcctttttaaaattggttattttttatcaccttttttcctctactagtttcaaagacatgtaccatttttactattttaatggtcttcctagaaattataacattcataccatagaaatatcttcatttctgtcttgaacaacacaattttaactttattcattcccttcccaatttaagtgctatgattttccagtattttagttctgccttttttttcagtattttacttttgacctattcctcattcccttctttctttctctttctttctctttctttcttctttctttctttctttccttcatttttttgagacagagtcttgttctgttgcccaggctggagtgcaatggcatcatctcggctcactgcaacctctgcctccagggttcaagcaattctcatacctcagcctcctgagtagctgggattacaggtgcacaccaccttgcccggctaatttttatacttttcgtagagacaggatttcatcatgttgcccaggctggtcttgaactctagacctcaggtgattcacctgccttggccatctttatttaaatttaccataatctttgctcagcatttcttactgcatctcagatttcccatctaggatcattttcatccttcttgaagtatattctttagaaatatatcctttgatacaaaatcaacgtacaaaaatcaatagcatttctatacaccaacaacatccaagctgagagccatatcaagaatgcaatcccattcacaatagccacacagaaaaataaaataaaatactttggaatacagctaacaagggaggtgaaagatctctacaatgagaattacaaaacactgctgaaagaaatcaaagatgatacaaacaaatggaaaaacattccatgctcatggataggaggattcaaagtcattaaaatggccatactgctcaaagcaattgatggtttcaatgctgttctatcaaactaccaatgacacttttcacaaaagtagaaaaaaaaacactattgtaaaattcgtatggaattaaaaaagagccagaatatccaaagtcatcctaaacaaaaagaacaaagctggagacatcacactactcaacttcaaactatactacaaggctacaatagccaaaacaacatggttaaggtacaaaaacagacatgtagaccaatggaacaaattagagaaatcatatataaaggcacacacctataataatctaatctttgacaacatcaacaaaccaagcaatggggaaaagaaccccttattcaataaatggtgctggtataactggttaggttagccagatgcaaaagattgaaactggaccccttcctttcagcatatacaaaaataaactcaaaatggattaaatacttaaatataaaacctcgaactacaaaaaacctataagaaaacctaggaaatgccattctggatgtcagccttggcaaagattttacaacaaagctccaaaatcaattgcaacaaaaacaaaaattgacaaaggagacctaattaaactaaagagcttctgcacagcataagaaactatcgacgagtatacagacaacctacagaatgggagaaaatatttgcaaactatgcatccaacataggtctcatatctagaatctgttaatataagaaacttaaattagcaagcaaaaaataaacaactgtagtagaaaatggacaaaggacatgaacagacacttctttaaaaaaagacatatatgtggccaaccaatatatgaaaaaatgctcagcatcactaatgattaaagaaatgcaaatcaaaaccacaatgagctatcatctcacaccagtcagaatagctattactaaaaggacaaaaaataacagatgttggtgaggttgtggagaaaagggaatgcttatacactttttgtggaaatgtaaattcgttcagcctctgtggaaagcggtttggagatttttcaaagaacttattaataaaacgaaactaccattggacccagcaatccccattactgggtatatgccaaaggaaaataaaaacacatgaacacatatgttcataaaagcactattcataattaggaaaggcatggaatcaacctagatgttcatcaatggttcactgataaagaaaatgtggtacatatacagcatgaaatactatgcagccataaaaaaagcacaagatcatgtcctttgcagcaacatgggtgaagctgcaggccattaacctaagtgaattaatacaggaacagaaaaccaaataccacatcttttcattataaatgggagctaaacactgagaacacgtggacccaaagaagggaatgatggacactgtggcctacttgagaacggagggtgaagatgtaaaaataactatcctagtactatgctcattacctgggtgacaaaataatctgtacaccaaatctcagcaacatgcaatttacccacataacaaacctacacatgtacccactgaacctaaaataaagttggagagaagggggaaaatataatactatgatgtaaattgaaaaataaaaaataaaaagaaatttatcctttggaaagtactttaatgatgatctttgggtagtcagttgagtttcactttaggtttgcctgaaaatgttgtcattttgcctttgatttatagatagtttcactcagttaaaccttcctaatcagcaattattgtctcttaccatatggaatatactatttctcttgttctggttttcattgttgctgcgagagaccagctgtcaaccattcctctgtaggtgatcagtttattccttctgactgctttaaagatattttctttgtctttggtgttttgtagcttactcatgtattttggtaaggatttcatttttaacgtctgctctggatttattggaatttatgtatctgaggatttatgtctttcaataattttgggaaatcctcagccatcatctctttggatattaccttttcccatactctttattttttttgttgaaactcaaattatacttacattagatatctcatcctctcctgtgtgacttttaagctctttcatattttccaaatatttatctttcttagtggagggtgtggaatttatagttcaccctccctgttgttcactctctccgttgaagggagagtgtttttgtcccagtgtcccatgatctctgtttcttgtctcataactctgtgaggaaattgaatctgaaggctactatgttcagtaaatgtcctctggataaagtaaaatttagcagtagtttagctgtctggacttctgttttatcgaactagattttagccagatagttatctaccttattgcctgctcattgatgcttttaagcactattagatagcattttttaatggttttcattgggaaagtttatttgagtatctgtcccaccatattatcagaaatagaaggtgatattatttatataaattatcaggcaggggttaggcatttaataaacagtagctattgttattattgtttattctactagcctaaccagcttctgtctgttatcttctttcgttcatgaaaatgtcatgcatggaaaaaaatgataggttttttaatcattaagggaataattcttcatttgtttttctattagtagaatgtcaaggacaagttctgaattctaataatttgaaccagaaaagtaaaaagcatggtcatacatgtgttccaaggctctgtaataataataaggaaaagacaaacaactctctttattttagttttgaagacaataactttgatcatgcaaaacacagtgaagagttgaaaaaaaaagcactcaaacagattaaactatacagcaaactttgtcagaaaaagagaaaatgaaagacctatttttccacatgaatcataaatatcagttgattaatataaaataaaatgttttcatgcctacatgaccgtatctgatcaaaactgcagtgtttgatgagtgttgctgcttctgtctgcaggactggaaagaagtaaaacactgtaatttcagaatttataaaccagacagggttgctcttaggatactgaccatgaaagctgtcataatcctaaatcataaaagtaagtatgaacacgcctaaatgccaatatctctttactattatctcttgccaagtttgtactgacaaaactaattaaaggaaaagtgatactcaccacattcatctcattggtaaaatatcaaccacatgactaacttttgaactgtcaagattatggcaacatttaacacttctcaagggaagatatcaaatagagtcccagattgttgctcaatgctgttgccttctttcagatgcgaagatatgattctgaggacagaagtaaggacgtcaagaacagcacatctgtagaacagagtcaatcatgacagaatagttattttatttgtttagttttgcccagatattttctatggatcaaagttactgaaactctaaactctcacagctcagaaatgcaaagtattcattagccatcctacagaagcatatcagaatttaagagtatgtggatatttcctgttaggtatcagaatcataaggaaagtaaatgtggggtcacataagttgcatccccattcctgagtaagagataagcagtaaaatagggggaagtaagccagtaaggaggcagtttggaggtagtggaaagtgtagaggacaagttgtttgcaaatctcaaacaagccctgggagaggaactaataactgggacttgcagggatcaaaggagtgagggggacagaattcagacatctgactggtgtatagaggaactttaccctggagtatgaacatgcaaagggagggccagcgcaccctgcacaacctggaaccatgacaaaggacaaatactggtaactagattggacactgatggtagtcaccaaggagaaaatgctaactaagcctactcacattaaatttttgagaagcaggtataattgctgaatttgctgattcctgaatctgctccagacattaagccttaaatgtgctgatggttggggcacttaaaccgtaagccataaataatcacaattaatcttagtaatgaatcaaaatatgaatcattgtgaagaccaagcagatctatattttaaagagaaagaagtaaacctaagcatttaaagtttttccttcttcacatgtaagttgaagaccagagcagaaaacattccctaaagcataacttccaaaccacaccaaagtctttggctcttgactccccagtaccatgtgctgttgaatcaacagtattgtaaaacctttcagtctagtgggacaaatagaagttgagctcctattatgtgccaggaaggtgtcaggggacagagagataaataagacattgtccttgccactgtaccaagcattctcttttcttccaagcattctttataaaaaggccataaagcctttgaagagaactttgtgtaattatttttgatatttacttagtgtttgtgtccatgtggctctagacattggacatgaggcaggggctccataaatcttactaaatggaaaaataccacttatgtgacttacatattagtttcctcttgctgccataacaaataaacacaaagttagtgacttaaacaacagccacttattatctcacagttttgtgcgtcagaagtccaggtacagcctgccttaactgggtcttctacttggggaatcataaggaataaatcaagatgttggctgggatgggctcttatctggatgctctgggaaagattctgcttctgagtaacattcatttctctgtggttatagaactaaggcctccatttcctttacacatgaccccttcatcaagccaacaatagtaccttaattccctgacttccccttctgttactagccaaataaagaactcagcttttcagtgcttatgttattagattagacctgcccagataatccaggataagtaaccccaattatacctgctaagttccttgtgccatttaacataacatattcacaggaggaacacaagggagccaaatttctgcctaccacagcccatttaattgcaagtgatataaaactgccctaagtggtttacaccaaaagagagtcaaaagagaatgtattaggcaaatgggaagtaaaggagtgatgcatctttaccatgaatacaatcatgcctgaagacattatcagatctcagtctctgacttttttttaatctttcatctctgctcccctctgtgtggccttattctctccaagggcagactaattttctttaattccaattttgtttatttccagattagtgacccaccgaaaaaaaaaaaagaaagaaaggaaaaaaaaaaaaaaaagcttttctcttgcaatgtcaaatcagagccccgctgcctggactttgaatttaagcagtgttccagtagtgggtaaatggttgtgactcattcattccaataccatgataactcattcttgatactgaggactctggtgcatggtcacaaccccactagggccatacggagtgggaaagaaggttgtgttgggaaaggtaggaaaaaaatagcattatagtctatttcactagtagttattttcgagagtcacaaatttctgactagtctgtataatctgagagccagggccatgtgctagtcacctttatatattccataacatatggcataaggctttgcacaaagcagaagctcaataaatatgaatggatcaattgcacagaggtaaattccccaaagtgtttactatctgtcaaaaggcaacaaggaaacagacaaactgaaaaaaatagtggttttactacatagttcatgttaattacaactagctttacatagtaaattccagtttacatagcatgtctacatataaagacagctataatacaagttgggttttaacaatagccccattttacagatgagcctgagtgaggtagagacttgcccgaaatagtcaaagtagtaagtattgaacaagaacatctgattcatattttctgttttttctacgactaaatattggccagggagtcacaccccaccctcaacttggccttgtgttccttgtgctgggtgtttttggcacctgagaggaaggagagtgactggactgcggtgatgagaaagtgtgctctgtgaactgccagtcatttcaaaagagaggttaatggcgtcatgaagtaagaccacaaggggtgcctaacttagacctgcaaaagacagccagccaggggtatatgaagaaagaggaaagaccctaccctatgtacaaagatacactgttagctggttacctggtgttccagaagaagagaccacactgggaggtcagactgttatcctttcatgttttatgctatcattggtgggaattccatgtatgtcccctggcaatgaatttctttgaaaatttggttctgaattcaatatcgaactgtggttttttttttttaatcctaagtagaaatggcttggcaggaagaaaaaaaatgaaccacctgtctttgtccaactgtttaaaatatgttttttccaagcatcccagtctttccactgttgcttttttttttttccaacaaagaccccactccttttcacaaaatatgtttgcactcaggaagtcttccttttctctgaggcagataaagttagcaacaaagccactggtctaaagcattcttttaatttatgtaacagactactatggtacatccccctaccccattccacttcccaaaaagaagggtctcctaaaatgttcttatgcagatatttgaccagctttattttctttcctcataatacattttggggtatatgtgaaatatataaagagacagacacacacagagagaaataattctagttgcttttgttgtcaggtctgaaacacatcttgcacaagttaaagaattaagaaatgaaagacaattccaattttctaccattttcttacttaaggcagttatggacttttgttaagccatgaagtccaaaaaaaagaaacacaacgattttttttaacaagcatgtggtgtatagcaactaattaatcactcaggagataggataataagtatagagatagatcatgaattccagttacgctaagttagtttactgagtgattcaagtgatttatcaacttaggcgcattggtgtgttattgaaaaaaaataaacttatcaaactattacctgaaggaaacagggagcctccaaagctttcagatgttttcccaactagcaggaggcccctgcttgcttaaaacagtctacgctttttgttttctgggtttttgtttgtttgtttagagacagggttttgccatgttgcacaggctgattgatctcaaactcctggactcctgggctcaagttatccacccagctcagcctcccgaagtcctgggattacaggcatgagccaccatgttcacccttagtctatgcaatttaagcaagaggttaatggagaaagtctctgcttttctaagggtctctaaactttgtggccagatgttttcagttgttatatttatatcgtctcactgattctgagaatcccagcatgtattctgacaagaactcaataaaacatcaattccaagtcatctcctcaccaagcttgacttatcagcgtcctccatcaactgcctggtggaaattcccaccagaaatcattcaggacaccaatacagctgagggtcagaatcctctctaccttacatttcagacacccccaaataattgctcttatttgtaaataactcttaacaaaaagtagaagaaaaataagaaggtatccaagactcaataaaatgagtgaaatagctatttctagtcaattttatataaactttattagggctcaagaagagtctgtcctttttacagagccatgtgtcccttctctgtagctttaaaatcttcactgtcttggtgtaaaatttaacccaatttattttaaatgtgctgttcttatcttcctttaatgtaactccttggatattgatgcaaaaattctcaacaaaatactagcaaaccacattcaacaatacattagaaagaatatttatcatgactaagtaggatttaatccctggactgcaaggatggctcaacatacgcaaatccatcattgtgatacatcacatcaacaaaataaaggataaaaaaaccatatgatcatttcagttgatgctgaaaaagcatttgagattataaaattcaatatcacttcatgataaacaccctcgaaaaattggagatagaaggaacatacctcaacatagtaaaagccatatatgacagacccacagctagtatcatactgagtagggaaaaactgaaagcctttcctctaagatttggaacttgataagagtgcacactttcaccactgttattcaacgtagtactggaagtcctagctagtgcaatcagacaagagagagatataaagggcatccgaattggaaagggaaaagtcaaattacccttgttttccaatgatatgatcttatatttggaaaaacctaaagactctacaagaaaaattttagaactgataaacaaactcaacagaattgcaggatacaaaatcagcatacaaaaatcagtagcatttctatatgccaacaatgaaaaatgtgaaaagggaacacttgtacgctgttggttagaatgtaacttagtacaaccactacagagaacagtttggaggttccttaaaaaaactaaaaattgagccaccgttatgattcagcaatcccgctgctgggtatatacccaaaagataggaaatcagtatattgaagagatatctgcacccccctgtgtttgttgcaacactgtttacaatagctaagatttggaagcaacctaagtgtccatcaacagattaacagataaagaaaatgtaccacatatgcacaatggagtactattcagccataagaaaagaatgaaatccagtcatttgcaacaacatggatggaaccggagataattaggttaagtgaaaataagccaggcacagaaagacaaatattgcattttctcacttatttgtgggacctaaaaatcaaaacaattgaactcatgaataaagagtagaagggtggttaccagagtctaggaagggtagtggggggctcagggaaaggttgggaaggttcatgggtaccaaaaaaatagaaagagtaaataaatcctactatttgattggacgatagggtgactatagtcaataatcactcaatcatacatttttaaataacttaaaaagtataattggactgtttgtaactcaaaagataaatgcttgaaggaatggatatcccattctccatgatgtgcttatttcacattgcttgcctatatcaaaatatctcatgtaccctataaatatattaacctactatgtacccacaaaaattagaaaatttgtttaatagtttaatatagctccttgagggtaagaatcagtgtatttcctcactgtacccaaaccacccctcccagcaacatacacaatagtttgcactaagtagagaagatcaataaataggtaataaaaattagatgccccagaaaaataatcaattacttttaccttctagacaactgattgatgaccaaagtattaaaagagaatttcaaaaattcaaaaagatcttttctataaaagcatacagacatgtaaaatgaacaatcttcgttattatatttctgggacaaaaagtctatgtgaccacagaattattaactgattatttttgctctgaagccattttgagtcattttttatttcctcctcttttgtggcttgctttctttcgttaagtcttcctgggaaatttccctttcagattgggtcaaaaggctgtggatttcctggtttctgtgagacaaatggctggaagaaaatgcggatttaccaagaagggtggagatgagaattgtctgaggaatagttgagcttcaagagacattccccaagattatgtggactggcctttcaaggtggttattcaggattgtcactggaagaactcaagattatagtagtaaggttaaaacattccaaatctgagacagaactgatcaagatttaaggagacatctgggaagcaattctcagtccacaaacaacatttgcctgttttgtttcatgcccagaatatttggagaaggatggataggagagtcaggacaggaagagggaaggtgtttaaggaaatctttctatactgactgcttttctcttccttagatgttatcctgattaagaaacaaaccataatccttattaaagataaatacaacaggggctgtttttgcctgggaattgccctctataagttaaagctaccatgtgcttttcctggcacatctggtgttattaatgacctggaatattgaaagaattttcaaaccctcagacagaaacacaagtagttacatcagtaattagcactaaagagaatttatagcatctggatatttcagtaattaagatggcccagagcatttcagtctgttgttaagcacagaccatcaaaggagtgatttccacaatgtatagatttattccctgtctcaccttacttgcagcctatagaggctgactgctggacttaagttccaagaactgtaattgaaccccagctatcacttactactttgtaactttgggcaagtttcttagtccctccaaactggagctctcccatctataaaactggaatattttcatctaccttacttagacaaaaggatttttgtgaggctcaaaaaggaaaatagatgtgaaagcattttacaaatccaaggcactgtgcaggagttactgaataggattgctgttgtagggggtcctttgatgacccttgcctaagttatactaacagttgtgtggtcctcaactgaccatcatccagcattcgggcagaccttccattgcccaaatccagcaacaagtggagcatgaatgaattgaaaccaagtcaaatctgtgttcaccttgttcctgacagctctcctggtaattagtactccagagctgttttcaaagataaaaattgagagataaatcctaattgcattgtcagtttcatgtattctattacattacttttggagaggctgtattaaatgatataacaaagtatatgtatttcacaagaatgtacataaatattaatattctttgcttaagttcaggaaaactattatgaaaagtattcctttgcccctcagacctcagtaaagatgttttaaccttcctactaaatcacttcagattatgttccatgccagtggtatacgttatatatcctgcaggtcaatagctggacggcaatggcattcatccagattctcatttttacataaatggctttaaaacacgttctctgtattacaccttcatcttatcctggcccagcaaaatacatatgattccatataatgcgaatattattatgatgagaaagagttactaaggagtcaaaatggtgttataacaacttactataaaatctatgtgctcggtctgaaaataatccaaataagcactagaaactgacagtttaatgtattactgaaaaggtcggatcaagaagcaggaaggctcacgaaacaaaagcatatgcaaaagaaatagccaaaagagtatcatgactcctgcaaagatttttatttggagacccaaatttctagccctaaacttgatatgcttctgctcatatcagagaaaaaaaatctccttattagaaacattggaaaagtagaataatgtagacattgtgtgtttgcactgattcaaatcaatggaaatttatgcttttttagaattaataaatgtgaacacttagattttaaatctgcccacataccaagatgttacatatccatctgccatttaattcagctggtctgatgagaattcttcatgtgcattatacttgaatatgttttctacacagtttgccgttggctttttaagaataatgttttcaagcatgattatagatttatatattctaatagtgctttggggggcaaacctcttaaataatttttgcttaattaagtgtagcttcaaatgtgcatcttctaaaagaggacttgaaggatttgccaaggtcttataattatttagatttatggcccaataaagcatcgttcctatattataccctatacaacaccatttgtatattccagggggagaaactgaggcagaaatgggaaaaccttgatttagaatattcagtgattgagtccagcaacagaaatcaagtttcaaaattccttttcctataattgttttctagagctgccttagaagaccttgctgttggtatgaccagaattatgacaaacaacttactgctttttatgactgctggaactccctctaattggtatgagtgaaatcaaaatctagtagaaaccaaagaaacttggctcacgctacatgacaattctaacagtaaaattctaaaatgcaaacattcaaccattcaacagaaaaaaaaataaaaatcttcaacatgtgtctcacgccaaaacaaatcaaaataaacaataatagaatcatgagatgcttttgacttggcctggataaagcaaataacaaagttgtagcataaaataattgaggagaagccctctttttgagattgggcaaagaaccccaggtatcatgtccctccctcttctagctttcccaccaggactgtagatacctgactcggtctgaaacggaggctgctgcctagtgaacagagcttagtgggaagatgctgccacctccctttaaacaagaatgagtcaacaaagtacttaatcagacattttctgtattgagaaaacacaaaacaaaaacaaaaaggaccacagaaatcataagcagaaaataggatatcccagcattcctctatcccggaataagaagttggaacaaaaacaagaaaatattaaattttgaggattctttggtttgtggcaactgctacagattcctatgttttgattcaaaagttatttatttcttacagcaacattggtagcaatgtgcactcaggaaatggcaattctttttaattccaaactcgagaaactgtttctgcttcaacaattattatatgaggtgagaattagaaaaagatataaataacagtgtcacagagattgattgtaagtcggtgaaaataatagcaatagagataaaaatcttaactttctagctcagagactcttcttccttttcagcagtttgttactacataagtacaattttatgtttgccttgttatgtttttatgacaagttcttcctcagttgaagggtaattttgaaaatgttttgaatagcaaagtcttttgaatcactcaataattcttggcaagttaaattaagcaaaaataaattatatacaacccaaagacaaatctaacttgagagccattcaaagaaattgactgtttacatatatatatatatatatatatatatatatatatatatatacacacacacacacacacacctgcattctatctgttacaagtgtgtgattttttttaaaaggaagctgtccatagagatgacaggatcataaacctaataagccaaagtggagaagccacaagttaccatcccttcagtagaaaatgagactgggttgctcagccttcaatctgacagtttcaaagagaaaagaaatctattagcaagttgctgatggcttataaaaaacatattgcagaatcttgctcttctatttaaaggcatattcctgtcctttctcattaattctaaaagaaaaaaaaaagaaatcagatttgacatcctgtaacttgctccttaaatatcagaagccacatgtacacagcaagttctttataattataatttttataccttcttttctactttcctataccttaaaatatgtttttcaaaggtgtgtgtgatgtgtgtatttttaagaactatcatgagcatagagtaaatacaagtagctgcctctttttggtgtttgaagagaacaaagatttgtattcctggctgcatgtaatgaatgttcactgttgaaatcattgtgatatttcaaggggaaaaaaagtcatcaaatttctgaggggttggaccaggcatgatggctcctgcctataatctcagcaatttgggaggccaaggtgggtggatcacctgaggtcaggaattcgagaccagcctgagcaacatggtgaaaccccatctctactaaaactacaaaacttagctgggcgtggtggtgcacgcctgtaaccccagctactcgggaggctgaggcaggagaacctcttgaacccaggaggcagaggttgcagtgagccaagatcacgccactgcactccagcctgggcaaagagagagactctgtctcaaaaaaaaaaaaagttctgagtggttatagtgaatgtagtataaataatacccattggctatgctttcttcttgcagagggagtgcatagaattcataagcataagctgacatgctagaacacgctagccatggatccttcacctaaacaagagactccatttgataactgttcctttataccaaataaatctgctcataagagcccatagttcaggaaagttaaaaggtaaacataaaatagcacatataaaaacatatatatatattatatatatatgtttgggatgcaatctgtcagcatcttaaaaactccattagtacatatagatacatatatattttacctgactcatcatgtctaaaatgcttagagtttaagtcaggatggtgtttctccctcagctatattactaacatgtaacatttgtcttttggaaaaccccatcagccttttggggtcactgtttgacttgtattatagtgaattatttatgaatctggatcctgcaacaaattgggaagcaccaattttctatgtttacgtttgtttacctgtttgttcttaaaaattcccatagtatgtggggcgttgcctcacccaggaaacacaaggggtcaggggatttccctttctagccaagggaagctgtgacagactgtacctggaaaaacgggacactcccacccaaatactgcacttttcccaaggtcttagcaacaggcagacaaggagattctcccatgcctggctcaacaggtcccatgcccatggagccttgctcactgctggtgcagcagtctgaaatcaaactgcaaggtggcagcctggctgggcgaggggcgtcctccattgctgaggcttgagtaggtaaacaaagcagccaggaatcttgaactgggtggagcccaccgcagctcagcaaggcctactgcctctagactccacctctgtggtcagggcttagctgaacaaaaggtggcagacaacttctgcagacttaagcgtccctgtctgacagctctgaagagagcagtggttctcccaacatggtgtttgagctctgagaacagacagactgcctcctcaagtgggtccctgacccctgtgtagccaaactgggagacacctccaagtaggggccaacagatacctcatgtaggtgggtgccactctaggacgaagtttccagaggaaggatcaggcagcagtattttctgttctgcaatatttgctgttccacagcctccactggtgatacccaggcaaacagggtctggagtggacctccagcaaactccaacagacctgcagctgaaggacctgactgttaggaggaaaactaacaaacagaaaggaatagcatcaacatcaacaaaaaggacatccacaccaaaaccccatctgtaggtcaccaacatcaaagaccaaagttagataaaaccacaaagatggggagaaaccagagcagaaaagctgaaaattctgaaaatcaaagcgcctcttctcctccagaggatggcagctcctcgccagcaacagaacaaagctggatggaaaatgactttaacaagttgatggaagtaggcttcagaagatcggtaataaaaaacttatccaagctaaaagagcatgttcaaacccactgcaaggaagctaaaaaccttgaaaaaaggttaaatgaatggctaactagaataaacagtgtagagtagaccttaaatgacttgatggagctgaaaatcatggcacaagaacttcatgatgcatgcacaagcttcaatagacgattgaattaagtggaagaaagggtatcagtgattgaagatcaaatgaatgaaataaagggagaagacaaggttagacaaaaaagagtaaaaagaaatgaacaaagcctccaagaaatatgggactatgtgaaaaggccaaatctatgtctgattggtgtacctgaaagtgatggggagaatggaaccaagttggaaaacactcttcaggatattatccaggagaacttccccaacctagcaaggcaggccaacattcaaattcaggaaatacagagaacaccacaaagatactcctcgagaagagcaacccgaagacacataattgtcacattcaccaaggttgaaatgaaggaaaaaatgttaagggcagccagagagaaaggtcgggttacccacaaagggaagtccatcagactaacagcagatctctcagcagaaaccctgcaagccagaagagaatgagggccaatattcaacattcttaaagaaaataattttcaacccagaatttcatatccagccaaactaagcttcataagtgaaggagaaataaaatcctttacagacaagcaaatgctgagagattttgtcaccaccaggcctgccttacaagagctcctgaaggaagcactaaacatggaaagaaacaaccaataccagccactgcaaaaacatgccaaattgtaaagaccatcgacgctatgaagaaactgcatcaactaatgggcaaaataaccagctaacatcataatgacaggatcaaatgcacacacaacaatattaaacttaaatgcaaatgggctaaatgccccaattaaaggacacagactagcaaattggataaagagtcaagacccatcagtgtgtagtattcagaagacccatctcacatgcaaagattcacatagactcaaaataaagggatggaggaagatctaccaagcaaatggaaagcaaaaaaagcagggattgcaatcctagtctctgataaagcagactttaaaccaacaaagattgaaagagacaaagaaggccattacataatggtaaagggatcaattcaacaagaagagctaacaaccctaaatatatatgcacccaatacaggaggacccagattcataaagtaagtccttatagacctacaaggagacttagactcccacacaataataatgggagactttaacaccctactgtcaatattagacagatcaacgagacagacggttaacaaggatatacaggacttgaactcagctctgcaccaagcagacctgatagacatctacagaactctctaccaggaatcaatagaatatacattcttctcagcaccacatcgcacttattctaaaattggccacataattggaagtaaagcactccttagcaaatgtaaaagaacagaaatcacaacaaactgtctctcagaacacagtgcaatcacattagaactcaggattgagaaactcactcaaaactgcacaactacatggaaactcaacaacttcttcctgaatgactactgggtacataatgaaatgaaggcagaaataaaagtgttctttgaaaccagtgagaacagacacaacatacaagaatctctgggacacatttaaagcagtgtgtagagggaacactaaatgcccacaaggaaaagcaggaaagatctgcaattgacaccctaacatcacacttaaaagaactaggcaagcaagagcaaagaaattcgaaaggtagcagaaggcaagaaataactaagatcagagcagaactgaaagagatagagacacaaaagccctgcaaaaaatcaatgaatccaggagctgcttttttttaaaggattaacaaaattggtagactgctagcaagaccaataaagaagaaaacagagaagaatcaaaatagatgccataaaaagtgataaaggagatatcaccactgatcccacagaaatacaaactaccatcagagaatactataaacacctctatgcaaataaactagaaaatctagaagaaatggataaattcctggacacatacactctcccaagactaaaccaggaagaagttgaatccctgaatacaccaaaaacaggctctgaaattgaggcaataattaatagcctaccaaccaaaaaaagtccaggaccagatggattcacagccgaattctaccagagatacaaagtggagctggtaccattccttctaaaactgttccaatcaatacaaaaagaaggaatcctccctaactcattttatgaggtcatcatcctgataccaaaacctggcagagacacaatgaaacaagagaattttagaccattatccctgatgaactcaatatgaaaatcctcaataaaatactggcaaactgaatccagcagcccatcaaaaagcttatccagcatgatcaagtcggcttcatccctgggatgcaagactggttcaacatacacaaatcaacaaacataattcatcacataaacagaaccaatgacaaaaaccacatgattatctcaatagatgcagaaaaggtgttcgaaaaaattcaacagcccttcatgctaaaaactctcaaaaaactaggtattgacagaacgtatctcaaaataataagagctatttatgacaaacccacagccaatatcatactgaatgggcaaaaactggaagcattccttttgaaaactggcacaagatgaggatgccctctctcaccactgctattcaacatagtgttggaagttctggccagggcaatcaggcaagagaaagaaataaagggtattcaattaggaaaagaggaagtcaaattattcctgtttgcagatgacatgattgtatatttagaaagccccatcgtctcagcccaaactctccttaagctgataagcaacttcagcaaagtctcaggatacaaaatcaatgtgcaaaaatcacaagcattcctatacaccaataacagacaaatagccaaatcaagagtgaactcccattcacaattgctacagagaataaaatacctaggaatccaacttacaagtgatgtgaaggacctcttcaaggagaactacaaaccattcctcaacgaaataaaagaggacacaaataaatggaagaacattccatgctcatggaaaggaagaatcaatatcgtgaaaatggccacactgcccaaggtaatttatagattcaatggcttctccatcaagctaccaatgactttctttacagaactggaaaaaacctactttaaagttcatatagaaccaaaaagagcccacactgccaagacaatcctaagcaaaaagaacaaagctggaagcatcatgctacctgacttcaaactctcaaggctacagtaaccaaaacagcatggtactggtaccaaaacagagatatagaccaatggaacagaacataggcctcagaaataaaaccacacatctacaaccatctgatctttgacaaacctgacaaaaacaagaaatggggaaaggattccctatttaataaatggtgctgggaaaactggctagccttatgtagaaagctaaaactggatcccttccttacaccttatacaaaaattaattcaagatggattgaagacttaaatgttagacctaaaaccataaaaaccctagaagaaaacctaggcaataccattcaggacataggcatgggcaaggacttcgtgactaaaacaccaaaagcaatggcaacaaaagccaaaatgaaaaatgggatctaattaaactaaagagcttctgcaccacaaaagaaactaccatcagagtgaacaggcaacctacagaatgggagaaaatttttgcaatccactcatctgacaaagggctaatatccagaatctacaaagaactcaaacaaatttacaagaaaaaaaaaccctatcaaaaattgggcaaaggatatgaacagacacttctctaaagaagacatctgtgcaaccaacagacacatgaaaaaatgctcatcatcactggtcatcagagaaatgcaaatcaaaaccacaatgagatacaatctcacaccagttagaatagcaatcattaaaaaattaggaaacaacagatgctggagaggatgtggagaaataggaactcttttacactgttggtaggaatgcattagttcaaccattgtggaagacagtgtggcgatccctcaaggatctagaactagaaataccatttgacccagtgatcccattactgggtatatacccaaaggattataaatcatgcaactataaagacacatacacacatatgtttattgcagcactattcacaatagcaaagacttggaacctacccaaatgtctatcaatgatagactggataaagaaaatgtggcacatatacaccatggaatactatgcagccataaaaaatgatgagttcatgtcctttgcaggtacatggatgaagctgtaaaccatcattctcagcaaactatcacaaggacagaaaaccaaacaccacatgttctcactcataggtgggaattgaacaatgagatcacttggacacagggcagggaacatcacacactgaggcctgtcagggggtggggcgctgggggagatatagcattaggagaaatacctaatgtaaatgacgagttgatgggtacagcaaaccaatgtggcacatgtatacctatgtatcaaacctgcaccttgtgcacatgtaccctaggacttaaagtacaataaaataataataataataataataatgtttaaaaaatttttaaaactcccattgcactcatttacatttgtatgcccaaacataattttacgtaaattacataccaaagagcataacatcgtgtctgacatatagtaggtactaaaatatatatatagctgcactacattatgaaaatctttctaaggtgcttttatagcattaatgcactctttttaaagactgcactattccatggcccgaataaacccattttattcaatcataacctatgtaagacatttactttgtttcttgttttcggccattacaaacagaataaatagtcttatatactcagctgcagtaaataatcttatatactcaattttgctctaagataatatatgcatcctgaaaatcactatgcaatgcaaaattgtgcaataaaaaccacagagcttctggagaaaaatgggttgcggactcaacattcaaaaagtctcccaaaacagcaacatataaaaaagataggaacctaaaaaatggtttaaaatggtaatacatgtgttaaatacacattaagaaatacataaatactataataaatatggcacttaaccttgaagaaaacctgaaatttgcatgaagaactgggcagaagtaggtttgcaatttgtgagttattgtgaagtggtagatggatggttatctgaaatcagatggaacattggaatactagatgtggataggtacggctcattatgcagtgaactgaggtaactggagatattagtggtgtctgttttgtgttttgccaggcagcttggttcagacggatgcagtttcctgccatcctctagtatttcttacagaaaaaataatgcagaagcaaaagcaaaatccacactatgttcaatgtgttccctaatatatcagcttcactctagcaaattcacattttaaaagtcaagtgttacagcactattgactatatatgtgtcattatatgccaatgctttcattcctatgagttagatttccaggataggggctaatggatttttttaagatgctaacagattgcatcccaaacagctttaataattttaagatattttccattttcacaacctcagagaagacaatccagtcccacaccctgaacctaatttttttttctttttctgagatggagtctcactctgtcatccaggatggagtgcagtggtgcaatcgaggctcacatcaacctctgccccccaggttcaagctattctcctgcctcagcctccctagtagctggaactacaggcatgtgacaccacacacagctaatttttgtatttttagcagagagagggtttcaccatgttggcaaggttggtctcgaactcctcacctcagatgatccgcctgcctcagcctcccaaatgaacctcattttttacaaagtttgagacaattgtgagactgggtgagagttctaataatggacactgactctgcttcctactagtcaaagtaaccaaacgattcatttaaaggaccaggcgtttctggggacaagcaggaaaaggaaccatcccctacttatccacccttcacctctgcctctgtagctcagcatcagaagtaaaagattagaccacaaggtctacttcctaaaataaaaatttgccacattgtaaaatttaaaaattctctcttggaaagtgttgaaatatacatttaaaaagataaaatgaaaataatatatttattactttaccagggggagaaaaccatttttaatattttgtcaaagtctctgtctttgtgttttgacatcatatgatatttagctttatcttgactattttcatgtcataattatccttaaggtgcttcatattaacactatatacctacataatacattctactatgtgccataatttacctggacatttttctattatagaaaatttggttgttttcaaatggattctgtcataaaaatcccttccaattggcatttttgtctatgtatattatatatgtgtgtgtaatattatatatataatttcttcagaatagtttctaagaaggagaatttctggatcaatataggtgtatgtttaaggctaatatattttacaaaatacctttcaaaaatattacaccaacttatagctctacaaatctggccttaaccagattttattaccttttgtaaacctcttctaatttgatatttgaaataatatagcccagcacatctctggctgggttatattgtaaattaactctagtttttttagctggtgcccagaagtgcaggtaaggagagttcctgaaaagagcatgtgttgtctttcaaagcctgtgtgtcatcttcaaacaggatttattggggagtgggctacttatgtgggcccagaggattcaaagaaacaggcaggtacaagatttttgaggaaattaacctagatgtccccatttcaaatctcaagagtccttctgcttcctacctaggccctgatcttggtatagtagacttgctgaggttgaaatgacaaccttctctgcagttccactgttcccataattaagtcctggaattgatcttcgactttttcttctgtttatagaagataaaattcattttgtatgctgccaagaaagccccctggctttcatactttgccttaaagtggggattaatcaccctcagcctttccttgtctttcttctccagtgcattgctagtatctaggaaaagcaatctgattcccttggcctggtaattactacttccctagaaccgctcaaatgcctgagatattgctcctgccagtgcattaccttccactcgtgtcctattccagctcagaacttgtaaaagttctaacaactgcactgctatagcatgctaggggctatcatttccccacctaataccagtggcagggttctcatttccctgcagccagcaagggatccagcttcaaagttgcattttagattctgcttcctcagacattctaactggtgtttaaattgggttccctaggaaacagattctaagatggaacaatacttataaaagaatgagaaataagaattggacagagggggaagttgaacgtcagtgtgcaattctaacaggtcttagccagtccttcaagagcccaggagctagaatggctcttccaagttttccagaattgagacaaaaaggccaggtcttcgtacatctgcatagaccagttctttgatgtgagctaactccagtaagagggtataaccttgagcaaagcagctccctttattctagagcaatctccaaagtggtactcagccatgaaatgtctacagccaatacttctcgcaggtgtggaaatgcacgcttcagacctgaaggggcaacgcagaaggcataccacagcatccaccacatgcttccacaacaataaaaaatagtttggatattacttagcttaatagttcgaagatgtgtctgtaaaagtcagcataatgttcaggtaagagaacaaatgatgttttaaacaggtaaatcaatacacttaagcaaaaatgtagtttgaatattaaagttggggaagatgttcataaacatcaatatataaacaggtaggataataattattttataatatagagaaattaatagtatatagccaatagtaaataaaaatagggagggaccaaactctttggccaagaaataagctttctttatagcacaaggtgtgttctgtaagttacacatcctctccactcccggatttttctccacctttgagttgctgtgccatctataaaatttgtttatacaaatttttatctgcctgacttccatgctgccactcattatgctcagcctcataggcaaggaacagtggtaaagaagagagggcatggttcccaaaatagatttcattttgtgcaattccactaactacttttcagtcagctctctgctttaactagaaaaaaatatagtaaggagaagaggttgaaattagttgaatcctcttacctccaatatgaagattattaatcagcatagattattgtaggaagcatgaatttcaaaattctgtggtctaggtgattctgacaagttatctagattaatcttcctcattcaatttagtgtgtaaagtattctagtcaagacccttgagacccaccggtttgccatgacaaagaaaatttttaatcccattaatgaatgaatcagcaccatttcaaataaagagctaatgaactttattgaagtcatagataaattactatgctatgaaagttagaaattattatattgtgaatataactattctactcagcagcccaaggccaattgtcaactctaatgagatctggtaatatggcccatatgatcttgggatttcaataaacccaggttcaagtcctggctctgctacctggtagctttgttttcataagcaaatgattaacttctctaagcttcagttgcctgtttcatataatacatatatcaatgccacctacttcatggagttttgcaataatatgagcaaatagcatagtactggcaccgagaaagtactaaataacttttatctatattaatttaatattatttttagcgtaacaataattgttatttgtattaatgtttttcaacgtgtaactgatctttctcaatgttcttgggttgtaagaacaaagcctaacagaagcagagttgattttttagtgttttaaattgtggccctccagaggacgagcagtccaactgtgcttgtttaatgtggtttgttctgcaccatatgcgtgtgggcttttaataaatgctgtttgatgatgatgatgagttcttggagacagagcagtgttcagcagagtcactacattatgtttggccttgctttctactactcgactccaggaatgctcttgtgagcagtaccgaaacttctgaaatttccatttgaggtaaagtaccgctgccagcaagctgcacgaagggagtcattaaccctcaccctcttttcttgtggctcttgccaaactgaccctcggaagggctttctcagtgggctgtcctgcagttctcagcagcactccacagcagtgctatctgctgtccttcctgagaaagcaagggtagaatagccactgagctcagtgggccaacttccaaagtccaaactatggggaaaaatttattacaactctacctagaggaaaaacaaaaccaaggactcagtctatagtcagtccctaatcaatgcaaaaggagcttacagctccagggactcaaataggatttaaacattttagaaatgtttacattaaaaacaatgatatattaaagcaacaagcctgaaaactacgatggaaagcaaaaattctttctccccaaaacttacattaaagtgactgagcagtatgaagggttttctgcagcaatcaggcttttcaagagcccaagtcctttttcttggatagttcactttccaatccaagatagacctttcaactgagttttgtcttagtacattctcgtcactgctataaaacaataattgtctttgaattaagtctcttttgtttcagatgtgccccccaatttttagaagaaaagtgttttttcttgagtgaagtgtcaaatttcttatggacaaaactttcactctcctatctaggagttatcattggaaagggtctagagacccctggtacaatctttccaaaaaggatactttaaatgaagagtgcagaaaatgctgtaaatgaataatgcttcttttcagacaacccgggttctccaaacacagacatagctgtgatgctttgccaggtcaagaaagaaccccatgtttagcaatgatgacctggatttgcagcaacattattagctttgcagacagtctgcctatgcaagcttagacccgatttccaaagttcgttgagattattgcctgaaatatcagagaagagttaatagagtgaatagagattcaaaagagcagaagaacatcaaatcacttttgtggggagaggggacacagggagaagcctgagtcaatgtgccttgacttggaaaaagacaacaagactataagtttaaccttgcaaaagtcacagaaatgagaaattttgccttactatacctaagtttatgtgtttacagttgcactctaagtcactctttactctttgatccacttaatcatattttacatccagttgatcaatcatttcatcaagtgtttgtttgtttgtttgtttgtttgtttgtttgtttgtttttggagacagagtcttgttctgtcgcccaggctggagtgcagtggcgtgatctcagatcactgcaacctccgccttctgggttcaggtaattctcctgcctcagcctcctgagtagctgggactacaggcgcatgccactatgcccagctaattttttgtattttagtagagacagggtttcaccacgttgcccaggctggtctcgaactcctgagctcaggcaatcagcctgcctgggtcacccaaagtgccaggattataggcatgagccaccatgcccagtcttcatcaaatttttaaatccatccacagagactttgcaacaatattccaaggatttttttttcattgttgacaagtctgttgttactggcaatgtgtgtaggaactagtcctggtgacctccctgtgaacccaccaaaaagtcaaaatttgcaatttcttgttcagtgtaaaactgagctttgaccttgaggactttgttgtggtggcttcccttgggaaatcaaagagactggtcatttctcaagtccctagaagcagttctgttgtcagaatctctcaggggcctttgagtaagaatctttcaacttaatggttcaagtacaagttttcattggtatacagaagccgtaatctaaataacaagtctttcaagaagtgacaggaagacacaagggagagaaaaagaggaaactgtttttgagaaaagaagaggtaagataatataaaacgtagtaggaaggagtcagtttgagctacatagccacatcagtctctccatctttttggaatgtctcatttatttgctgggtcctttccattgttctcgctggctcttctcatgtagaaagaaaatactttctctgccaattacaattgaatcttttacacctcagctgagaacattctgtaggttggactttattctaatttacttggatacccttcctattggccttatttttcttgtgtctcagttataagccttccctaagaagttaggtactgctattctacgcctcactcagatgttgacataacttttttcaccagcaattctacttgtcaaaagtaattaggcatgctatcaaatgtctggagccaggcagatcttctttatgatacacttcagcaagacgctcaatttgtaggtttattcatccatatccttctctgcttgtttgcccaacccgtgggaccacttctctttcttagaaacacatggttttgtgaaggccaggatcagtcagtgttttttgaatgagtacccattatgggccaaaactgtgtgtgagaaacaaaaaataaacatgaacagagctgaaaaataccctaaagctttagtctaaaattttcttgtctcccaacaatgaaattgagatccagagaaataattttttcaagtcattctataatatcgtggtgggactggaataagaaaacagttcttaccacaactcctggactttcacagattcataagtctttcaattagttgaaatgacaaattccagaacatcataacccaaaaacatttccctgtacacttatatggtcccctctagtcagaaaaatctaccctgtttgaaaatgtttattaatgcctcatcttcctaagattttccacaaaaccaagctctaaagagaaaggtaatgagttctttccattttttgttattcaaattctcactgacctcacgggtcataaaaaatcactatcaacaattctgcaagggttacaaagtaacacacaagttagcagtggcctcagtgaatacagaactgcatatgtcaggaagcctgtgagaaggaccatatgtaagaattgaaatgtggtaactcttttgtttttttaacttttattctaggttcagtgatgcatgtataggtttgtaatataggtaaattttgtgtcacaggggggtggtgtatagattattccatcacccaggtaataagtatagcagctgacagacagtgtttcggtcctcactgatctcccgccctccaccctcaagtaggtcccggtgtctgttattccccactttgtgtccatgtgtactcaaagatgagctcacacttgtaaatgagaacatgtggtatttggtttttctgttcctgtgttagttcacttaggataatggcctccagctccatccttgttgctgcaaaggacatgatctcattcattgttatggctatgtaatattctatagtatatatgtagcatattttctttatccagtctaccattgatgggcatttaggtggattccctgtctttggtattgtgaatagttctgcaataaatatacctgtgtctttatggtagtaccctatgatttatatttggggggcatatacccaataatgggattgctatgtggaatgataattctgttttgagttctttcagaaatcgccaactgctttccaatatacctgaacaaatttacactcccacaagcagtgtataaacattccctttgctctgcaaccacaccagcatctgttattttttttatatatactttaagttttagggtacatgtgcacaaagtgcagctttgttacatatgtatacatgtcccatgttggtgtgctgcacccattaactcttcatttacattaggtatgtctcctaatgctatccctcccctgtaccccaccccacaacaggcctcagtgtgtgatgttccccttcctgtgtccatgtgttctcactgttcaattcccacctatgagtgagaacatgcggtgtttggtttttttgtccttgcgatagtttgctgagaatgatggtttccagcttcatccatatccctgcaaaggacatgaactcatcattttttatggctgcatagtattccatggtgtatatgtgccacattttcttaatccagtctatcactgttgggcatttgggttggttccaagactttgctattgtgaatagtgccacaataaacatacgtgttcatgtgtctttatagcagcatgatttataatcctttgggtatatacccagtaatgggatggctgggtcaactggtatttctagttctagatccctgaggaatggccacactgacttccacaagggttgaactagtttacagtcccaccaacagtgtaaaagtgtccctatttctccacatcctctccagcaactgttgtttcctgactttttaatgattgccattctaactcgtgtgagatggtatctcattgtggttttgatttgcatttctctgatggccagtgatgatgagcattttttcatgtgtcttttggctgcataaatgtcttcttttgagaagtgtctgttcaaatgatttgcccacttgttgatggggttttttgtccttttcttgtaaatttgtttgagttccttgtagattctggatattagccctttgtcagatgagtagattgcaaaaattttctcccattctgtaggttgcctgttcactctgatggtagtttcttttgctgtgcagaagctctttagtttaattagatcccatttgtcaattttggcttttgttgccattgcttttggtgttttagacatgaagtccttgtccatgcctatgtcctgaatggtattgcctaggttttcttctagggtttttatggttttaggtctaacatttaggtctttaatacatcttgaattaatttttgtataaagtgtaaggaagggatccagtttcagctttctacctatggctagcgagttttcccagcaccatttattaaatagggaatcctttccccatttgtttttgtcagatttgtcaaagatgagatagttgttagatgtgtggcattatttctgagggctctattctgttccattggtctatacctctgttttggtaccagtaccatgctgttttggttactgtagccttgtagtataatttgaagtcaggtagcatgatgcctccagctttgttcttttggcttaggattgacttggctatgaggctcttttttggttccatatgaactttaaagtagttttttccaattctatgaagaaagtcattggtagcttgatggggatggcattgaatctataaattaccttaggcaatatggccattttcacaatattgattcctcctaccaatgagcatggaatgttcttccagttgtttgtatcctcttttatttccttgagcagtggtttgtagttctccttgaagaggtccttcacatcccttgtaagttagattcctaggtattttattctctttgaagtaattgtgaatgggagttcactcatgatttggctctctgtttgtctgctattggtgtataagaatgcttgtgatttttgcacattgattttgtatcctgagactttgctgaagttgcctatcagcttaaggagattttgggctgagatgatgggcttttctagatatacaatcatgtcatctgcaaacagggacaatttgacttcctcttttcctaattgaataccctttatttccttctcctgcctgatagccctggccagaacttccaacactatgttgaataggagtggtgagagagggcatccctgtcttgtgcccattttcaaagggaatgcttccagtttttgcccattcagtatgatactggctgtgggtttgtcataaatagctcttattattttgagatatgtcccatcaatacctaatttattgagagtttttagcatgaagggctgttaaattttgtcaaaggccttttctgcatctattgagataatcatgtggtttttgtcgttggttctgtttatatgctggattatgtttattgatttgcatatgttgaatcagtcttgcattccagggatgaagcccacttgatcatggtggataagctttttgatgtgttgctggattcggtttgccagtattttattgaggatttttgcatcgatgttcatcagggatattggtctaaaattctctttttttgttgtgtctctgccaggctttggtatcaggatacagcatctgttattttttgactttttagtaatagccattctgattgatgtgactgggcatggtggtttgcatcttaatcttggattcttgggaggctgaggccaggagtttgagatctgcctgggcaacatagcgaactatcagcacaccactatattccagcctaggcaacagagcgagaccccatctctaaaataaataattaaataaagaacgggttttttttttagaacagctgttaaattagcagaacctacttagctctagctttcaaatagtccaaactttttaaactttttcaactttctgtcagacaaattaagtcattaaaacaaacttacataaggaatttgctctaaaggtattcctgtatgtcctgggatcaggattctatgtattcaaatctcacacaaacaattctaaaccaaggatagtctattatttactgattaaggattaaaatggcccccatagcctcatggataccaaagtaggagcatacattgatgtatgttagaatgattttcaatactaaaagctttgtcccttaacattacagcaaaaattaaccaaacaatactaacttctaatattccaataaaccgagattttaagatattgaatacaatagaaatccattacgatctttagtatgtctaacaactgagcatcagtttcctaaagtacacctgcattgagataacatcactaatcctacattcaacagtagttatacctagtcaagtaacttcaagtctttaagtatcacctttcttaggcttaaaatagagctggtgagcattcagctaagtgagttttaaagtccttcccaactgtgaagttatttgattatgtggattctataacactatttgtgtatcacccgaatattaatcctgtcctctggcaataaaagaaaaaaaagcacaaaataaaatcctatacaacctctccagtgtgctaaaaccctgtaattctcattgactctaaaagcagttctgcagatgtgagaggaagaacataaatagtgtgcacctctgcaaagtgaaactgagtgactgtgagccagccagctgcaccaagaatgacttcaattgagctatgagttggtagctggttctcaaaccagctgtgccacaatccttgatccagtcttatttgcaacaagaatgtgtatggagacccaagggaaaacatttatttgcctgcaagagattaaagatagagataccacaaccaatttgcaagtcattggtgattataagaaatttctcaaaacagaaatatttgctgagtattttgttttttgttttgtgttgttttgttttaaaccaatacccagttgagtatctacaatgtatccgaatagtaataaacactgtggagatagaaagatgaataagccatagctcttgccttcaactctgtaggggaaataagacatacacaaatagatacaacacaatgcagtagggatgggcctacaaataatggagacaacattctttaagaatcaaagtaggtttttggctggtcatcatcgagtcattttgacctacatcacataatcattaaagatatttatacacatacacactggttgcaagccaagaaatatgaccatggcaattaaacattttaagaaaacaataacaaattaaacaaagttggtgaaaatttagcgaggtttgtaattataactctagttctatcccattaacaaaggtattggaatttggtgttttagagattagtaaatctgatcaaagtagacatttcatacatgtcactctattaaatgaaatgtgtttttgaaaacactaaaccaaaagcaaaatggatgacctcaccccaacatgctattcttggaatttctgacagtcttgtttaatactgtttcattgtcttcttatcaaaaaaaatttttaatggagtccttcgtatctttagtggaaatggtatatttagtagaaaatacagaataaacctaaattcttatatacagacaacttaaacttccttatgagattgaccatatgcatgtaactattctctccaaaaaatgtgctacaatgtcagtagaggaataaaaagatatcagttctaaaaaacaaaaaaattatgagaaagacaacatcagagtatgagaaatttcagcaaatttttggataactaatggagtggtggtaactaagcttatggaggaatacaatctcaagtgcctcgaaaggtcttaggtcaggttccttagaagcagagcctgaaatggagattcctgcgtaaatgacgtattgatgaaataccctcaggagaaactcataggaaaatgaaggatgttggctagagcataagaaaaggctaggcaaaaatgtgatttcagagaagtctagcttcagcccgatcccacaaagagtgctggaggataaatagtaccaaaaagttatcccttccagacaaaagaatgccgggctattacaccactgcatcagtcagttacaggtctgccccaggcagagggagagaagtgtgatctcccatgtatctctgaaccaacaagctcccctttgccaaggacaatctttcaaggaagtgtacaggtgtgagccactagagcagcaagcatctccaacagctggaggctgggtgtactcccttagtaaagggaatctgggcaaggtaccaacagtatcttctctagccatcacttacacagcttagtccacttgcttctcactttaaatatactccatctggtcactgcttcttcagggttctggttggttgcaatttccagtaaaatttacaggaggagagttactggggatgagcttctgcctccctgctgaaataggtttcaagaccttaactaatatacatcttcctcttcttccatcctttctagatttcctccccttctgataacacttctgataatttaggtgacttagctattgggaagacacaggccttcatccttgagtagtcaaagccccttgttagcaagcctttattgtttcatttgccagtttacaattgagattgggtgtcactttatcaagagatatcccactggcccagtggatcatctaagtgccaaacgtattcctccctgccttttcatatggcagtaattttaccacttcagtggtgaaaagggtcaaaattagccttcccaatagacaattcctttctttgcctgctggtaggccacaatgccaggtgtcagctatagttttgtttttatttggtttctcttagccactaggccaccagggatgtagttttaaattaggttgaacgctttctgtgatcccaggtgaaagaatttcccttgtgggaaccaggatctctagactcacggagctagagcttcatggtaatgtgaatcagatcatgcttacttatatcccttaatttctctttttattattaccttttatttaggttcaggggtatgtgtgcaggtttgttatataggtaagctgcatgtcacagtggtttgatgtacagataatttcatcatccctagtaataaacatagtacctgataggtatttttttgatcatctctctcctcccactctccaccctcaagtaggccccagtgtctgttgttcaccccctaatatccctgagttctcattatttagttcccacttataagtgagaatatgctgtatttggttttctgttcctgtgttagtttgcttaggatgatggcctgcagttctatccatgttgctgcaaaggatattatctcattcatttttacggctgcatagtattccatggtgtatacgtgccactttatccagtctaccactgatgggcatttaggttgattctacatcttttctttctcttttttgagacggagtcttgctctgtcgcccaggctggagtgcagtggcgcaatctcggctcactgtaagcgattctacatcttttctattgtgaacagtactgcaatgaatatatgcctgcatgtgtctttatggtagaacaatttattttcctttgagtgtgtatccaataatgggattactgggtcaaatggtaatcctgttttaaattctttgaggaattgccacactgctttccatagaggctgaacccccaccagcaatgtataagtgtttcctcttctccccaaacttgccagcatctgttattctttggcctttttctaatggccactgtgaatagtgtgagctggcatctcattgtggttttgatttgcatttctctagtgatcagtgatatcggactttttcatatgcttgttagatgcatgtatgtcttcttttgaaaagtgtgtgttcatgtcctttgcccacttcttaatggagttgtttttagcttgtaaatttgtttaagttctttatagaggctggatatcagacttttgtcagatgcatagtttacaaatatgttctcccattctgtaggttttctctctactttgttaatggtttcttttgatgtgcagaagctctttagtttaattagagcctatctctcaatttttgtgtttgctgcaattgttttcgatgtcttcatcctaaaatctttgccaagtcctaagtcaagatagaatttcctaggttatcttccagagtttttatagtttgaggttttacatttaagtctttaatccatcttgagttgacctttgtatatggtataaggtaagggtccagtttcattcttctgtatgtggctaaccagttatctaaacaccatttactgaatgaggagtcctttccccattgtttgcttttgccagctttgtcgaagatcagatggttgtaggtatatggcattatttctgactcgtctatcctgtttaattggtctatgtgtctgtttttgtaccagtaccatgctgttttggttactgcagccctataacatagtttgaagttggataagtgatgcctccagctttgctctttttgcttaacattgccttggctattctggctcttttttggttccatatgaattttaaaatagttgtatctaattctgtgaagaatgttattgggaatgtgataggaatagcactgaacctgtacattgctttgggcagtatggtcattttaacaatattgattcttcctatctatgatcatggaatgtttatctatttgtttgtgtcatctgatttctttgagaagcgctgtaattcttgttgtagagacctttcacatccctggttaactgtatttctaggtatttttttgtgtggcaattgtgaatggaattgccttcttgatttggttctccgcttggctgtcgttggtgtataggaatgctagtgattttgtacattgattttgtatcctgaaactttgctcaagttgtttaccagatcaaggagattttggtcagcgactctggggttttccagatatagaatcatgtcatctgccaacagggataattgacttcctctcttcctatttgtatgtcttttatttctttctcttgcctgattgctctgaccaggacttccaatactatgttgaataggagtggtgagagagggcatccttgtcttatgccagttttcaaggggaatgcttccaacttttgcccattgagtatgagggtggctgtgggtttgtcatgggctcttgttattttgaagtatataccttcaattctgagtttattgagatattccttagtttctagatccatatagtctacctactggggacaataaaacatacaaaggtcattggttttgagcaaatacagtatcctgacgagcagtgcccaagattggcaggtgtcagtggatccctcaattataccaccaagagatcattccaatgctctatcaggacagcagcttccaaagaaggctgcagatgtaagctattagcaagcaccattccctgaagcagaggaatgtgtgcagcagcctagtaaaaagaatcttgcaggacaccaacagcatctgctacaggaagatcaaccagaatttaaaattaagctgtttcatacttcagaacgcaaaaaggctaagaattctacagaatacaggtaatacaggcaacagaaacaaaaaatcatcaataagtttaaattttcaaaaagactagtaagaaacagcattacaaaatagaaagatgtactagagagggtgctcggataaagaaacatccaaaagtaatgaagaacttttagaaaatagaaatgtaataaaataaaaaattcagtagagtgattaaaagataaatcaaagctatctctcaaaaatagaattaaaatattttaaaaattgaaaaataggagagagagaataataagtttagaatattccaacatttgacaggagttctagaaacagaagaaatgggggaaagaaaatcatcagttaaattattcaagaaaatttccccatcaagacatgcctccacagactaagaaaatcgactaaatgctcacacaatgaaaagacctgttgcacacacatcatcacaaatatccataagcaaccaggatacagagtgcagaagtttccagaaagggaaaagttgcattcaagagaattagaattgtattagaattcttaagagcaccattagatgataaaatatgatgggaaattcctttcaagttctgatggaagattattttcaacctaaaattccatatctagctaaactgtcaatcaaagatgagggaaaagtaaatgctgttttctttgcattctttattggaaagccgctaaagtatgtgttccagccaaagaggaaaagacaagatccaggctatgggacatttaacagaggaaaacaagtatgaatgttaagcccagagtaacagctatgcagaaggctcaaagagcagtgtgtttgcaatggagcagaagaataaggacttcaacaggaaagatctcaagggaaaaaaataattaatatgttaaccaaaacacttgatcatgtgagacaaaaatactatgggtatatgacccatctgatagagcaaatgggaaatagtaagaatagatacaaagaaaattgtgccacataaaattgaaataaataattaactccaggcaaaatagatatacaagaaaagaatggaatcataatacattgtagctatatgtgggactatttgcactattattattatgactactgtctattgatttaactaaaattgagaggatatataaacaaaggcatttagaagatccaaattttcctctatcctaaaagcaagtcaattgatgaagtctaaaatggataacccagggactcggggggaaggctgggaaggggtgagggataaaaaactacatattgggtgcagtacacactgcttaggtgatgggtgcactaaaatctcagaaatcaccactaaagaacttatccatgtaactaaaagaccacctgtaccccaaaaactattgaaataaaaataaaaattaaaaattaaataaagtaaaatgggacaatctcccccacccctccccacccgccccccccccacacacacaaaggactatcatttagaaaaatggaggcaattccagaaaaggcagctaacagagttgatagtgattgtatctgagcatagtgagggatgtatcagagaattactgactttttataagccttctctgtaaatattatattatgtaccaataggtatgcattaccttgattaaaaatttaaatattaaattaaggaaataatatattgtgcaataacaaaaatgtgtttcacatttctagcttctctatatagctaagacagataatttttggcatgctaagaaggaacatgtgaggcaagtgtttagcgagtcgaaaaagcaaaagtaatacaaatgagaagctggaaaccttgctttgaccccatcattacttcctatgcttacaatagcacaatcgtcatttgtcttatttttatatgcttggtttgaagtagaattaactaagtactgttttatatatttgtacatacataaagtatgtagaacataaagtgcttaggactgtatttctaactttacgaatcaaaatgcacagaagaatataagaagaatatctgataaatgacttgaatcaataatatacattttaagggctgggtgcggtggctcatgcctgtaacccctacattttggaaggcccaggcaggtggatcacttgagcccagaagtctgagagcagcctgcgcaacatggagaaaccccatctctacaaaaaaaaaaaaaaaaacaaaagaaattagctgggcatgatggcacatgcctatggtcccagctcttcaggacactgaggtgagagaatcacctgagcctgggaggtcgaggctgcagtgagccatgatcatgccactacactccagcctgagagatagggtgaaaccttgtctcaaaagaaaaaaagtatgatttatgtttttaaatgtaaaaactcagtaataagtaaacaggcaattcaatttaaatataatatatataatatcatatatatttaaaatatattattttaaaatacataaatatattacatactatatatataatgtatatatgcaaaagttttgaatggttactttaccaaagaagatatatacatggcaaataaacacatgaaaaaatgttcatcacagaattagtcatttcagaagtgaaaattaaaaccacaatgagataccactacatacccattagaatggctaaaatttaaaagattgtccataccaaatgttggtaaggaaattgaggaactagaatccccataaactgcaagtgaaaattttaaatggtacaatcacttttcaaaaaagttcggcagtttcttaaaaattttaaaacataccatatttaaacctcaaataatatgatcttgccattctattcctatatatttatccaagaaaaattaaagcatatgtccatatagagacttgtacatgagtattcttgacagctttattcatcctagccaaaagctagaaaaaaatgcaaatcatcaataagtgaatgaataaacaattatggtatgtccatacaatgtagtactactcctcaataacaactaatgagctttaaaaaataaggaatgaactactgatacatgcaacaacacaacatagatgaatctcaaaataattgcaccaattgaaagaagcaatacaaaaaagagtatacactgtatgatagcttttatataaaattcaagaaaatgaaaactcattgatagtgacaaaaagatggtggtttcttagggaaaagatatatggtatgggcaggaaaggtaattaaaaggaagaatggagaaacttttgggggtaatgtctatgttcactatcttgattgtgagaatgttttctaaacttatcaaatcatatgctttaaacacatgtaggttattacagtctattataactcacagcacagtttttttttcaccaaaaccaaagttattttatttttaattttttaacttttattttaagttcaggggtacaagtgcaggtttcctacataggtaaacttgaatcataggggtttgttgtacagattatttcattttccaggtattaagcctagtacccattagttatttttcctgatcctctccctcctcccaccctctaccttctgaaaggccccagtgtatgttgttcctctttatgtgtccatgcgttctcatcctttagctcccatttataagtgagaacatgtggtatttagttttctgttcctatggtagtttgctaagggtaatggcctccagctccacccatgtccctgcaaaggacatgatcttgttcttttttatggctgcatagtattccatggtgtagttgtaccacattttctctatccagtctgtcattgatgggcatttaggttgattgcatgtctttgctactgtgaatagtgctgcaatgaacaaacatgtgcatatatctttataatagaatgatgtatattcctttgggtatatacccagtaattggatttgctgggtcgaatggtagttctgtctttaggtctttgaagatgccatgctgtcttctacaatggctgaactgatttatactcccaccaacactctttaaaataaacaaacataaaaggaaatttttaaaataagtataggaaataagtaacccatatcactcagatatagtcattaattcattcagtcaacaactactgcatggctcgtatgtgctaatcattgtgccggatgctggcagcagaaatatttctacaacatgacttgtcttcccaaggacttcacagatttgtgaaataacagacacgcatcactgggtaaagtaagctatggtatttgtttccgagatggtaattaatgctccttgcatttttctttacatcaaaatattaaataaatataatgaatgttgctaggaatacctattaatataaagcactctttcatgagtagctgtttctctgttattctcactgtattaaccatatgctctttgggtaacggtaatatcttcccttttcaacattagtgtattaatactccaaaatcattataacacatccaccatactaataatgcagccagctctcaattttgatggtggattccagaaatctggctttggtccttgcacccttcagccacttgcatttaggggcatttcattgcttgttatcgcctctgtcaagagtgttcagtagaaaagaggaggcaaatctcaagcccatgtaatatcctgatgatggtcataaaatcttaaaattggaagtaatctccagtgttatctatttaaattcccactcagtgctagaatctcctctatcctatccccaacagatatttacacaagccagattctgcttgagcactttgaataataacagatcaaattcccagttactccactagtaaatgttacagtcttttccatgtttgcagttcaaatagaagctctgaggggtggttggaaacaatatttaaatttggctaaggaatagccatatgtattatgtattctagttattacatacacatacataatgtttatcaggcaaatgaagataaattcttccaaagtattacgttataaatacctcaccccaatattccctatgagtcaggcaggaaggatgggaaggagggaggaaactgttaaactgaagaatcaatctattagtgtatttaccatcatcgtctgcccaaccagcatgtgaggacacagcaagaatttggccacctgcaagccaggaagagggctctcaccagaactcaaccatactggcaccccaatcttggatttccaacctccagaccgtgagaaaataaatttctgttgtttgaaccacccagtctatggtattttgcgatgacagcctgggctgactaacacagtcagtcttaagaagacttttttgaaagtctatcaaaaagtttatcagagctcaaaatactttattgcctacttcaacttaatgcctacaatttaaaagatgttgtggattcatttctgttcagactacttaatcttatttttttaagagaccaaacagaatgtagaagaggaaggaaacctacaaagatggtgactgcctgcctgaatcctggacttggactaaacaacatcatttgacataactgatgcaaagttcctctttcataaaataaaaggttgcaaagtatgctggtgtgcacctgtagtcccagttacttgagaggctgaggatggaggatcgcttgattccaggagtttaagtccagcctgagcaacatagactcctgtctcaaaaaataaaggattgaaattttaaatgatccccaaatatcctctccatctatagaattctccaaatcttttaatttaatattggaggaaaaggaacagatatgtactcaatttggttgactgtgtaaagaactttggaacaaggtaaaaagggaacaataactgcctcctaaccaagagcattacagaattctccataaggaaactgaatttttcctgttaaggattaaagtattctcaaagtagatattcttactggagctcaagtatgatagaaaaaaatatagctgaggcctttcaaatgtactctgtaatttccccttctgtctaaaagcattcattcattcaacatatactagggactgagatgcaaagacaaagcaaagttgcccctgccccttagattcaaaaactagggaacactatttgacagagtttttctagtaatctcaataaacatgatctcaataagcataattaactatagggcttcatatcttcataagctatataatgtctccatttaatacaacaaaatgcgcacaccgaagaggcaggatgtcatagattcaggaaattttcatgtgaaagacatttcagagactttcttccctgaagcctcttcaaatggctttggggacagcaagctgctcccttattggagcttgcacacgatttgattctcttccttgcaactgcatcttcttatgttgtaatatctatttaaatatttctagatatcaaggggcatcaggcagaggaaccaagccttattcatttcccaggaacttgcaccacatttgattaataactgatgctcaatactacattttgtggacttaggatcatcttaactgaactagataaactggatgaggaggctaaggtttgtagctacttgttcaaggtctcacaggcacagtctgatgtgacagggccagagctaggccccagatctcaggctcacagtttagtgttctttccttgaatagcttgcaattaaggagctggtacctcacttggacttcgaatgtgtgtttccttgaagtaataagaaagcctagcagtataaacaaagaagcaggccaggcatagtggctcatatgtgtaatcccaacactttgggaggctggggtggcaggattacttgatgccaggaattcaagatcagcctgtgcaacatagtgagaacctgtctctacaaaaaaaaagaaaaaaaatattagccaagcatggtgtctgtaatcccagctactcaagaggctaagacatgaggatcacttcagcccaggagttcaagccatgatcacatcactataccccagcctggacaacagagtgagaccccatcttgaaaaaaaagacctaaagaaagaaataccatttgacccagcaatcccattactaggtatatactcaaaggaatataaatccatctattataaagacagatgcacatgtttgttcattgtagcactgttcacaatagcaaagacatggaatcaacctaaatgcccatcaatgatagattagataaagaaaatatagtacatatacaccatgaaatattacgcagccataaaaagaacaagatcatgtcctttgcagggacatggatggagctggaggccattatccttagcaaactaacacaggaacagaaaatcaaatattgcatgttctcacttataaaagatagccaaatgatgagaacacatgggcacatagagggaaacaacatacactggggcctttcgtagggtggagagtgggaggaggaagaggatcaggaaaaataactaatgggtactaggcttaatacctaggtaatgaaataatctgtacaacaaaccccatgacacaagtttacctatgtaacaaacctgcacttgtacccctgaacttaaaataaaagttaaagaagtaaaattttaaaacaagaggaaatcatgcaaaaagaaagaaaactgatttgaatagacatttctccaaagacaagaaaatatataaaaggctaagatacacaagaaaagatgttcaacaccattagtcatcaaggaaatgcaaatcaaagcgacaatgagatacaatttgatacccactaggagagatataatcagaaagacagacaataaggctataatcaggaatatgggcagtaacccatgttgacaaggatttggagaaatggaaccctcatccactgctggtaggaatgtaaatagcacagccactctgggaaacaatggcaattccttagatagttaacatagagatactgtatttcattcctaggatatacccaagagaaatgaaaacatatggccacataaaaactgtacatgaacattcaaagtagaattattcataatagccaaacagtgaaaacagctgaagtgtccatatattcatgcaatgaaatattattcagcaataaaaatgtatgaaatacatgtaacaacaagagtgagccttgtaaacatcatggtaagtgaaagaattcagtcacaaaaggccacatattatgtaattcaatttatgtgaaatattcagaacaggaaaattcatagagatagaaagtagtttaatggttgccaggaaccaggggaaagggagtggctgctaatggatatgaaattttataaaattggtacaactttgcaaatatactaaaatcatttaatgtgctcttcaaaagcatgaattttgtggtgagttacatctcaataaaaagtaccataaaggaaagaaatctacataaaacagtcaaacttatacaaaacaaatgtctttaaagaacaagttttaaacagtgctatgtagaacctggtatgaagtgaaatgaaatattagtacctaatatgtcccatgaggaagattgaaggaaaccaatgtttatttagagcctagtctacactctgaataaatgcattttctgtatcttctcattaatcttttgaggaatctattactcattttacagataaggagaccaaatgtcagaaaggttaagtaattttcccaaatcgcacagtaatctaagacagatctgggaatctagttcagatgcctaattccaaagcatgtgttctttccactcttgcacaatacttccttagagatttttccataaaacttggtttattgcaataaccaataaaccgtgtttattttattgcaataacaataatccttagaaggaaattccatgaaacttggttcattgcaagttccttcagaagttgtgaagtaaactagacaaacatcttcaaatgcctatgcaagtgcttgacaaaactgataagcccaacatgcttttgtattcatcccacctgccttcctgaccacctccttcatgaccaccaaagttgaggagagcattttcccaaagcccttgcctacacctagtggacactgtaaccctgcagcattcaggttcatcattacagtctccaaagcactcaaagctactttgcattcagtaggacttcaatgcgtgattgtggtgattgaatgaacaaacatgttatctcccttaaaatgctcattatacataggacacgtaagatgaagacacagtaatattaaccatttcaaaaccaggtataccccaggaagcctctttacaggagagtaaacctgtggacagacttggtagatgtgaagctattccccaatgcttcttacagcaggttatagactgatggcagtgctatcttccacataatgatacacttatactccatagtcctcttgggtggggccatatgacttgctttgaatagtgggttgagaaccaaagggacagatgtttcttccaggccaagtataattgctgacttcatgcacttctctcttttccactgcacagtgaccagcaactgctgagatggtagctgcttcgtcaggtacatgagtcctcagttgacccacatggatatattgttgtttctgtttctacagcaaaacctagccttccctgacatccaaatctccaaaggacaagttgtatgtgaaaatggtgagcagtacaatttaactagaacatgctaggccatgaggagctagaggagataaaatcagaaagagaactggaggtcagataatacaaacccttgaaatccagactagtctagaagatatattgcaggaggaaggtactacagatggaaaaaaacaattaggttggtaagcccaaagaaatgtgtcaggaaagaaacaaaaaacaaaaaaattctcagttaatatcagatattgaggcatggatgatgtcttcattttgagatccaagcgacagggttgaaagtagataatgaggtcaaaacagagaggccactaggcaggaaatgccataaccaatcaggaagctgcttaaagcccatggctaggaggaaagttgtattagttttctcttgctgctatatcaaattattacaagcttggtggcttaaaacaacataaacattatcttacagggctgtaaattagcagtctgacatgcatctcactggctaaaatgaaggcatcaacaaagctgtatttctcaagactctagggagtaatccatttccttgcctcttctagtttcttaaggccacctgcattacttggctcatggaaccttttctccatctttaaagtcagcaaggcggaatctctctgaccgtcttcatttttgacaacttctttgactacagctaagaatggggtggagtggaaatattttgaagggataatggtgatgagattgtgtccatctggagaatcccagataaactcccactttaagacttataactcaatctcatctgcaaaggtaacatatgtatcaagggatctaagggttaggatgtggccacccttaggaggccattattctgcctgccatcatagccaagcattaggaatgaggaacacactcaaaatatcaagaaacaaaagtatggtactggacaggggaatgctcagttctaatgtattctgaactactgtgggtcagacctgtgtacaatggctcttgtcttaaggcccgtaaagggcaagttcagtggtctaaatgagaagtgattcactggcctgaactctgccagtaatggggaatggaatattatagacagcagtgcccatggtgccctgagactgactattcctttgcctcaataagtgcaagctgaatgaatgaattgatgagtgagatgtcaatcaaataaacaggactgaacaacagtctggatacagaaggcagaaaaggggaaaggatttttagaaactttaacagtcaatgaagcagctaggagaggtacaaggctagatactaaaaaaaacatggaagagcgaaggatggaatttcttaactgagttctgaaagtggcacttctttcagaatttaatttattttacatagatgaagggaatacactgtcaaatagatataagctagagaaatgtaaaataattgtatgaattatacacttagaaaaggatcatcggccagatgttttgcaggaaaccaaaaactagacatagggaaactagacataaaaaaggattgagggaacttttaattaggagagtaagatcatttttaaatgcatttttatctgtgaataaatctgaatggataagaccatgttttaattatgaaacaggagacttgggatggagcaagacagtggaatagaaggcactacaaattgctcccatccccacccaggacaccaatttaacaactatctacaccaaaaaaaaaaaaaaaaaaaaaaaaaaaaagcaccttcataagaaccaaagatagggtgagcactcgcggtgcctggttttaacttcatattgctgtaaaaggcgctgaagaggtaggaaaatcagtcttaaattgctgacacccacccctctgttcccgcacctggcagtggtggtttggcacagagagggagatcacagcaactgtgaggcattgaactcagtgccaccttattatagcagaacacaaaaccagaccaaattcagccggcaactgcccacaggaggagcatttaaaccagccctagctagaaaggaatccagatcccagtggttggaacttgagttcctgcaagctttgccaccatgggctacagtgccctggagtcctaaacttgaaaggcagtctaggccacaaggactgcaagtcctaggcaaaacctagtgctgaactgggcccagagtcagtggacctggctggtgggttgtaggggggccagggaggacatgacccactgcgacaccagccaggctggctaaggaagtgctggcatcatccctccccaaccccaggctgtacagctcaagactccaaaaaaggccccttccttcctcttgaggaaaggagagggaagagtggggaggactttgtcttgcctcttggttactagctcagccacagcaggatagggcaccaatcagattcatgaggccctagctccagacaacatttctagacacatcccaggccagaagggaacctgctgccttgaagggaaggacccaatcctggcaggattcatcacctgccaactgaagtgccctttggccctgaataatcagcagtgaaactcaggtactatgtcaggactttgggtaagactctgagacttgctagtttcaggtaagactctgagacttgctagtttcaggtaagactcagcacattgtcagctatggtggctgtagggtgaggctccttccacttaagaaaagcagagggaaaagtaaaggggactttgtcttgcatcttaggtaccagctcagccacagtggggtaaggtgtcaagaagtttcttggggtccctgattccaggacttggcttttggacagtatttctggaccttctctgggccagagaggagcccactgccctgaagggtgagtcccagggcaagcagcattcaccacaagctgactgaagagtccttgggcctcaaggaaacatcagcagtagtctggcggtactccctgtgggcctgtggtggcagtggccacagggtgaggctcctctgcctttagaaaggggagggaagagtgggaaggactgtattttgtggttcgatgtcaactcaactgcagtacaatagaacactaggtagacttctgggagtccctggctcccagacagcacctctggacttacctggggcctggaggacctcaccaccctgaagtgaaggacaaaggcatggctggctttgccacttgctgattgtagagccccagagccttgagaaaacataggcagtagctaggaagtggttacagcaggccttaggcaagcccagcactgtgctggtttatggtttgacccagggcagtcacagtggtggtggccacagggatacttgtgtcactccaccccccagcactaggtggctcagaacagacagactctgtttgtttgggagaaagtaggagaagagagcaaaagattcttcctggtgattaagagaatcctcccggatcatgcccaataccatcagggtaagtacgtttatgagtctgaaagaaccagtgtcactgaacatggggtggccactaaagcagatacagcttagatcacaacatccaagttcctttgaatatctggaaagccttcccaagaaggacaggtacaaacaaatccagactgacaagactacaataaacacccaagtcttcaatgcccagacacagatgaaccatctacaagtatcagggccatccagggaaacatgacttcatcaaatgaactaagtaaggcaccagggatcactcctggagaaacagagataatgtgacctttcaaacagagaattcaaaatagctgttttgaggaaactcaaagaaattcaagataacacagagaaggaattcggaattctgtcagacaaacttaacaaagagactgaaataattttaaagaattatgaaacaatcgttttgaaagtgcctgccttagacctctgcagtggaggtatgctgcctttggattcattgactcagtaagatgtagtgaaaactgaaaactataataaatctcaactcctatgagcaacacccgattaaatttcattctggcttttgcacaatggtggcaatggctataatccagaacataaacaaaaactcatatggaagcaacaaacacatttttttaaatcatatgttattccccagcccaaagaactctttgtctaggacttttgtctgtgacttatatttatattactgaataactccacccagtgaacatgaagaacagatgagtacaaaaaggcaacatttacatagtctaatgattcccatatatggacaatagatatgcacgctaagaagtctggcaattctttttttttttttttttttgaaattgacttaatgagatggtgacaagtgaagtgtgtgcatgatcagtcccatgataactcagacatttacatttacattctcatctcttgaaaatcaagccactcattctctattgccaatttgctttaaaccaacatgtcaataatgggcaaactgccacaagtcaaatttgctaaaaacagaaccatggcataaatagaaaccagagctttaaccactgctaatgcaatgtgaaagttaataagaacgacacaagtcttaaacctcttgcttgttgaagcttactctagggatttgacaaacaatgataaacaaggaccagaaaaaatccattcagactgtcacttgaaatatgggttattccacatctccacgttgattatcctgataatgtagattgtctctagttaaacttacaacatgtgctgaccctctttgctacccaatacatcctgtttactgtgtatttgtgtatgagtgtggggcttacctagtttctccagataggagatgaaaccagatttgaaatccccattgggtcttcctacttctttgccaactccttaaaagttttgcataattcagatttttataaagactagtcaagaagaactgattctatactattaaaaggttaacaagaatttgccagtatacaatacgtatgacatacaaccatgagggtgtatatgtgaaatttactaccaatctgcttctcctttaataaggacagcttgagtcatatactctacacattcttggttttctccttttcctgtttccaaccactatgtcatttttaatccagaacctggcaccatgaggttttatctcttcacccttgatgctctcgctgactcaacactacaccccaatttccatcctgcctgtccccatcagacttagtaccactgtcattgtgtccatcactcatattttccacacatatttattgaacactattttgtgttccaagcaccatggtaggcactgaagatgtaatggagaagacactgatatttgactctcagctcttcctaacagatcaagtctcagtcttgtttctccagctatgtctcctgagtcttgaatagttcagtgctccaagatgaccccttggcccgctagctggcattaatcattaggtaaacatttcagccaaattgacactgatcctccagcagggggaaagaggatatctgtacaatgtcagagcctctgtcttagagcggcacttcagcatcccaccacactgtcctgtctcttcctggtgtcagggcagatgctacaacacccttgaagcctctcagcctgcaattgcttaaaggtcagtgtttacagttgaagatttctatatatcttatttattttttttttactttggttatttttatttctgcacctaacaactttatataaatctgtgtcattcaaggacatcaggaaatgaatctgtttggtaccactcactcctttcccatataaaaagtgggggcggaggaaagttttcaaaccattcaaaatgagttgcctatatgcagaatttctaataaatctgtaccaaattctctgctataaatgagatgttttggctggttttcaataaggactctttttctcctaattccattatgatctaacattgaattaatctgttttacacaggcaaataaatgcatttggcatgttaatgctgagtctgaagcatatttctgtccatatgggacagtatctgaaatcatgcagaaatcactacacacattaaaaacacttcctctggacagagtgctgaaatggagaaaaatgtttacaaaataaaaaacagaaaaactctatataagaattactcggtcatggatctgtgttctctttacacagatcactgaaactcattaaattttttgacatactaagtcacgactattgatataatgtgtctcatttctcatctaccaagttttaaaatactacttgccctatactaatcatagccaatgaaaatggaatgagatgatacatatggaatttctttgaaaagcctcaaggcctttctgtatttaagagagagtggtgatgttggtattggtggtagcaccagtggtggaagtgtagccttttttttttcttttttttttttttttttttgagacagagtctcgctttgtcaccaggctggagtgcaatggcatgatctcggctcactgcaacccctgcctcccaggttcaagtgattctcctgcctcagcctcctgagtagctgggactacaggcgcccaccaccactcccagctaattttttgtatttttagtagacagggtttcaccatgttagccaggatggtctcgatcttctgacctcgtgatccaccgtccttggcctcccattgtagccattttttttacagtctccctcatttaaggcccacagagcattagttccgtgagaagcccctcggatggcaggcagagtgtggggttggttttgcagtcaaataacctcagaaaaccctatatatgacatttaacttttgaaatttgaaaaggacattagccattcaaggattagaatagccttacaataaagaactatgtttaattttaataatgcagaatttctaagacataaatggattagaaatattttttgctacataacatctgttaatattccaaggcattagagttccacagagaatcattattatttagaaggaacatagaatgaaatgttcaactgaatcaaatgcttatcataataggccaactccttcccttcatgaaaccccaaattcttgcctatactagcagcatgcaaggtgggattcttaatttatgagaaaaccactgatactggcatcctcttcaaaaattaaaatccaagtttgggacctaaaaacaatatcccaaatgcctatcatttacatgtgcctgtagtatttttgtcacaaagagaaaaaatcaaaggaaaatatattcatggattttaaagacgtatatagccctcgtctcaaaatgaaaataaatcaatacatgtttatgaacaggttagccctatactagggctttgcataacacagcatttcctgctttcaaggagcccgcagtcttttggacccctctatttgagaaatatatgttctagaaggtagaaggaagcacaagataacaaaaattaaaataatagttaataggcatttgttcagatataaacataagttatgttgataaatgtcaccagctgtgagaaaccctcctggcccagctacagagagagtggggaatgaagatgcccatctgatcctgaacagtgtccttcctttgccatgtggccagatgagatcccaataccctcctaaaactctgtgataagtcaggcttggtggcacatgtctgcaatcccaacactttgggaggccgagttgggaggattgcttgatcccaagagttcgagatcagcctgggcaacatagtgaaaccccatctctactaaaaatacaaaaaaaaaaaatagctgggagtggtggcacgtgcctgtggtcccagcaacttgggaggctgagatgtgaggattgcctgagcctaggaggtggaggtcacagtgagatgagatttcaccactgcactatagcctgggtgacaccgggagaacctgtctaaaaaacaaaacaaaacaaaacaaaaaaaactctataccctatgataataaatacagcacagaaagtctaataaagacatataaatgaagtgttccagaaagaatgcaacatgcagaaaggatcaattgaaaatgtaagagaataaggaaattagaaaacagaagaaatgagactaagaaaaataaaatgaaaccaagacagaatgacacaaattccttctgtaaaatccaagaaggccaaaactatgagctacaacttacagagcttcatgggatctgacaactttttttgcacaagaatttaagtctcatttcttaacaggtcatttctcttcccactcccttacctagtgatctaaaattcatttagtcatgtgcaatagctgtgatgttctggcaaagagacttacctatttccttatacataaaatgaaactccaggagtttgactttccttctaggaaaacaaaccagctgccagaaatgaagagatctggtattggcacgctcaatgtgctcacaaaaccatatggtggttctaagccgaaatgacaagggccaaccattatatgtccacacttagggaataaattcataaataatatagaagccaaggtatatggggctctaaattttccccctcaatgtcacagagactcgctaaggatatcttagaagattatttgtctttaagggaaataaatgggaactagtcaccatgagggtgtcaagccatcatagagggtccaaaaataagtgctccagttctcaagtgcattcagcattaggtgcaacttttgctcagtcagtcaggcaaaactcttagtgtgcagtggtatttacaaaagagtatattctgaccctttatatttcaaagcaatgttgaaacacatctgttcaaataaccctcccaccttgactgactcacctggcaagaagagttagtttcctggccaacaggcagccagaccctcccgatattcaaccaaaatatataaagcatatcattgtcttttcatccccaaaaagcacagagatgaaccaagcttttcttttctgtgtgttacttaaagatattctctgtcttacacctggcattctcagtaaccacctcaaagctccctccaatgagtagactccattagatctcctatacagccccatacttatcttgcccatagaatctacctcagtgaagggaaattatctatttctcttcctctctcccctaccagactgtttaaaatcctcaaaaatgggaagccagtcatattgatcttcagaactcatttctatgaccctgcaagaaatgtaccaggaaactctaaatgtttgtttttgttttgttttgttttgagccaaatggggtaaagggggctgggaatggggaaagataagagagtatttaattattttttaatctctgcaatccacagattcatattgaccaccttactctatgctaggcttagtgtcaggaaaaagggttaggctctcaaggaaagagcagtaaaattgcaaagaaaagaggttagcatatgtataagacaaggtagactataaaaaattgcataagagaagtaccaattttcctgggcagttcagaaaactaaccaggaagcatttcctgaaggtggcatggaagtaataaaggatttgagcatgtgtctgtaggtggacccagcagcaggagctccattagcgaccatgcaggagctgagaagttaataacattttgaaaagcagattgtttcccctgactgaagcataaattatgtaaatcagaccggacataaagactgggcctgaaccttggaaaggggctttgaatgccaaacacaaatttagggttttttgtgaatggtgtgatgccatcaacagggtttgaacaagggtatcacataatttttgccaggtttacggtgatgactctggaggcaacatgggaagtgatctgggaataggacatgccagtcccaggccagcacacctgttagatctctcatctcagactttcatttttgcctttcaaatcagagttttcatatcatgaaaaatctcaggctgtataagatatgataactccgagcagaaaatactggatttactaaaatcgaacatgaggtaaataataagaacataagagactaaaccatgagtagaaggagcagaagatagaagataaagcagagataattattcatcagggaagtctaggatcaagacaattgtcgtatggtagctagggttcaagatagcacatagcgggagtgaattttatttctactgccctggaaggctttttagttttctctccttgagtgggaaaaaaaatacttgggctacattgctctccctcccttgctctgcccccatgagagaatctcaacaattaaatttcttaaggaattaaaaaaggttgaagtggctttagttgacattggtaatagggagagtgaaagctggaaaaagggttcagagaccgtaataaaagtctaatagtttggaaaactagaaagagctacagtaatttagtctatagcaaaaagggtgatcaaatttttcctaattaaataaaggggtacagcactggggaaaaggaactgtttacagtaagagtagagagtttcttaggaaatcaagctaatgtgttcagacatcaagtaaatctggcacaatagggaaaattttcagaaaccagagatttgtgtggtgtggttacattttcatccatcaaaaggacaatactgcttgcttcagaaaaaaagagttaaaaggctaatggctgagcctaggagatgcttaccaagccctgaaacttagagaggcaatggttgcagtcaagatctacttaaggaacaatggtaagccccaccttttgggattctgtacctaggatacaaataaggtttaatattaaggggtactctccttgtagcaaacactggagtaattaattaggagctcttccatgctgtgatggttaatattaggcatcaacttgctggattgagggatgcctagattgctgatgaagcattgtttctgggtgggtctgtgagggtgttgccagaggagatggacatttgaatcagtggactaggagaggaagacccaccctcagtgcaggtgggcaccatccaatcagctgccagggcagctagaacaaagcaggtggaagaatggggataagtagcttgctttctaagtcagatttctctttctctcttcctgtgtggtgctggaaactcagcttctccttctgtccttggacatcaaactccaggttcttcagcctttggactctgggagttgcaccagcatccccctaggggctctcgggccttcggcctcagactgagtgagggctgcactgtcagcttccctggttttgaggctttcagactttgactgagccattacctgcttctctctttccccagcttgcaggggacttcgccttgtaatcatgtgattcaattatccctaataaactcatatatatcctactggtatgtgtgtgtgtgtgtggtgtgtgtgtgtgtgtgtgtgtgtgtgtgtgtgtgtgtatctcctactggttctgttcctctggagaaccctaatacacatacctaaattgagcatgtgtatcattgtatgttgagctgacttcatggggatgttgagtgagtggagtgcccaccaactggcacacagcaggcatctggaaggtggaaagaactttagagagggtctggttaagccttcttattttacaaatgcagacacttttacaaatgcaaacactgagtccaaaaaggataaaacacctgccccaagttttcacctgggtagttagtggcagagcggggactaaactccagatttcctgactctccatgcactgctctttacaaagccagcaggagctgtgaggcagtcatctgtggggtcacctgcatcagtcagctctaccctatgggccaacaggaaaacagtgactcacaaaatccaacggtcctttggaatgcgtaagaggtgtgcctttcttctgtgctataaagcgttttccatttttgtaaataaaaccccattttaaatgtcctaggagagctggcaattttaagtgccttacggactacgatcatatttggtcatgcttagcatgggctaagactgattgactgatgagtcatttgatagatggagagcaaatttctgtacaccgtatttcaaattgtcagatttacttcaagtgagcacacctgtctgtgacttttgcttaggccaaagccacattcatttgcattttaaagctctaaggagtgaaaggaagaatcagagcttgaaatctggcatgggcagcacaaacaaatagttaaaaattaactatttgagaacatagatgtgaatgtgcagtttttaaagccagatcacactgttttccaatccagaaatccttgaaaactcaaggatctcatggatcaggtatattatttagggataatgtaaagctacagcaggtgagaaagacactgggctcctcggacacacagagaagacatcactctttatgtgaatcccatatgtcaccctggccacaccgtgagagggtcctgccttcctacccccttcctacaaccatacaggacactccagggaaaactgggctagaaccactactgtttctgccaccttgctcaggcctccaagtctgcaggatgcagacactctgttttctctatttctaagtatgctatcagtctgagatgcacaggcaagcatttatctgcaaagccacaataaagaccctatattcaaagaaaaatgaaatcttgaaaatatgccactttcaccatgccattctattgctcaaaagtcttcattgattctgcattgcctacagaatatagtttatacttcagactactgaggtgacctcatccctcctcatccctcctctccatttctcagcctcattgttctaccacatggacctttctatacagtcatgctggccaattcaccaccttctgaatattcctgtgatttccctggttgcacacatatcctcccttgcctggaatgtactactgtccatcactcgtctattcaaatgctactttccatggctcagctcaaatgccacctcctccctgaagtctctttactaaaattcaactatcaggatttcatgcttttcttcctctgtgagaaaagatgtcatattttcctctgctttgaatacctcacattgtctgatatccattcttaataaatatttgttaactgattaattctaaataaactccaaaaaagggttacatttgcaaagctctcaaaagtaaggtaatgatctgtagctgttatagccacacaatggaaacttcagagcatctagtatgttgtcattggattcctttccttccacagaagaccaaactaggtcatttcaaacctcagtcaccttcagagagattctaggaagggcacactaagagtcagcaaagagacgacattcctggattcctgacttgttgtccagatctgctactgaatcagattcaggtaagtgtgaatgggagaaatgaactaattattagtgccatccaaaaaaatgaaagcagtgcttttgttatgttggctggtttgaaaggaagaaagaattaaaaataagaagagaaattcagcctacagccatcaattgtcttttcttcaaatgtgcttttcttgcctttctggtattttttttttttcatacgtatgtgatggaactggaatgtttgagaagaattaacttaggatagaaaagatgatttgttgtaatctgataagggtatttactaacatactttatcacccagcttctcctctaaaagtcccattttgtttccccagaacacatttctttgctaaattaaaaagttccaaaagtggtattgtgcttgtaaaatcacatctgatttcagcgttatgtccaagaatagataatgcagtcctatttctaggtctagtaacaagtgttactcgtttgacagacttcactcagtagatttggccacatcctcaaaagacatactatttgggaagaggaaaactgagttatggagggtaagaagagagtaaaaccaaacagcaaacgggcagaaagttgatgtgaaagttttagctttctaagcattcattaaactaacaaatgctgaccattctctattgtcagtcctcaatattgctgtttattcaattagcgagactatacatatttattgagcacttattttttactagctagtaagccactagttataactttgtgcagccaaaaaattattgaatataatttgaatagggaacatagagataaaaaattataaaaaggcgaataatcaataatgcaaaacatcgtgagtaaatttgaaaactctggtgtcaaatttgtgtttacgataaaaattttaaattttttatttcatatatgattgttcttgcctcatatcccgggcacatgggagtttatttcgttgactcccagacgtaaccaattgagaataagcttagttacaaaggaagtaattgaggctttgagctcttgaagctaacagatggaaatacgtatgtaaaaacctaagtgctgtgtaaactcggcacatatggacgtaggtattattattatccaaatggcactactgggtattttcttaatagattcttttaaaatgcttttttatagttgtgggccttttttagacgaatagttcttaagaagaggaggggattttgtccctcagcgacatttggctaaatctagagacattttttattttcacagctgggtggcgagtgcggagtgggtactgctactggcatctggtgggtagaggccacggacactgcttaacattctacagtgcacaggagaggtccctacaacagagaaatattctcccgaaagtttcagtagtgctaagtttgagtaattctgctcttcaccatcaagtttccttctcttggagcctgctaccagccaatgacatcaggatctaacctgagacgaacctaggtgttctatacggcagcctggtgtactgaagagtgcctaaggtttgcaagctcgctagctgtggctccccctctcgctagcttgagctagttatttaaacccttagagatgcctttctttaaattaaaaaaaaaataaataaatctgcacaatatgaatcatacctacctcataaggttgcggtgaacactgaatgaagtacatatatacatattcagtacaagttcgttcctttattatttccagcctacccatccctcccccctcccattcccgccttttccccctcccggtactgtatctcccaccccaagtctcaggttctcttttaaaatgctttaattcctttggtggcaaaaatcaggcttgggctaggaagtgagtcaccactcagcagcgaaaggagcttgtttttctttctctgaatgcatttcttagtaatttcagactgatcctttagccacttgttggttgaatcctctcttaatgtttaagacacactgagaaagaactgtggcaccaagacgttttccgattgttaggaatgagagtgttttaaataccgaaaataaccagagggcagagagctctgaaatcctacgttacataagcagatgctggaagacccaggctggttctgaggttcctgtctccacaagcaagtccacgcgaatcctccccgttgctggatttactttaatgctgccgaagtctcaaaaggggcctctggatgctcagaggacaggcagcgcaggaacttccttgtcaaataagccttgcctggagggagagggatggggcgattttcacccgcgggcggtgggacggggctgagggctgggggctgcctggctccaggccatgtcagtgcctccagctccaggtccgggtccaccctgaactttggctctgctgcccggacgcccagcttcacctcccttgcctcgcttagaaacccttcagttctcccggaccgctatgtagcttttcaaattcccaaattcacagaaaacaccttcaaaagtcacaatcacccacaactccctctgccaaaaaatgtcatgcaaaaacggaaaatactccgattcccctttcctcccagacactctctctctctctgtctctgctattcattttctcccccacctttccccatctgtggtcaagatccctttcactatttctagttccctctcttttttcccttctccctctctctcccttttccactccttcctccgttgtgaccgcgctccccctccccccgccccgtcgtctctcctccgccttgcgggctccagtctctgcccgcccctccccagagaagagtgtccagctcctccagaggctgcccgcccgccgctccttccctgcccacctactatgaggagcagctcctcccacctgcccataaaagccaagtgcatgttaccagcagcggatcacagcccttccccgatcctctccgtgggagccagcgagcctctctccctgatcttacgtgctcaaggtaagacagcacttctgcaggcagctcacctaccaggggttgctatgggggaataagtcaccctctggccaacgcgtttgctgtttggttagagctgattcttacggatgcgcgatccgctgctcctttaactagcaactggtttgaaaacaaacttctgtttgaatggtaaaataaaagctccttcagggaagaaacagcagcataaatattgcgaaacctttctctttttaaatcactttttctcctgttgctgactgttgcttaggttaaaatgtatctgtttggggtgttgtactgacgtttttcactgtacatatttcacacatcagtgggggcaaggaaaacgttgtcccattgtcaaaaatgtactttaaaagaacacagttaacttcctaaaaatagcacagtcaaaaggtctgctaacaattttgtgatgttttccaaacccccaagacagcttctgtgagtcctttaaaaaaatatctttccaggttttagcgcttggaaaaaaatgatgtgaacgggtgccctttgcacggggacagtaagtaatcaggtggctggtagataggaaggaacaaatccaaattcacaagccagggtagaatgtgctctctcaccaggctatcttttcacgacatcctaaaatgagaattacgatggaactaagaaagtgtataaaagaacttcatgaatttctgtacacacacctaaacataaagtgtttcaatatgtttcacagtaagagaataatacaggccagattatacaatacttctgtgcacaccagatggttgtaaagaaagatcagcgagaaaggctttggaagttttaatccttctttccaccttttttcccccgcatttagtaaatcacaacctacctgactggcatccaattatcagagatattcagtgtttaagctaccctctttaaaagaaaatgatctcttcttattcctaaggtagaataaatgtgcacctgtgaaaggaaaaacatactccacagccacttctgtaaaaccagacacttggtccatgaagtttgccatcaaattctgtgggttgtgtgggatgaaactctctcaagtgggagaaaaaccctcttcaaatgtttcctctggggaattgctcaagaccacttagagaaggcaaaccaaaagtaccagtcaggaaaccaaaccactcttttagcccttaaggttcttaaagtaagaagagaaatgtttcacttttttatttttttgtttgtttatattatctcatgtggaaagaaaaaactcaccgaagctgtatgaaattctcccctattaaagaaacaagactcattagaaatttaacttaggtcttccaaaccatttctccttagcttttgcatatcaaaagtaataaaaatatttaaaagttctgcttgagatggagaggattcaatgctgttactcaaatgcaagagttatatataaagcttctgtcacgttaaatttttcttcattggaaaaaaatattgcaagaagtgcagtttcctttaagcaaattatataaaattactattggccaagatagtatgtgacctgagcatattaacataccttttatctcatgccacaatgcagactgcttgctttatatctgatgcacataggtaatcaaccatgacaagagtacaggtatgggacaaggccagaccaagtatgtggcacattcaagttaattcttcttttatggtagtgcctgactcacacccattatcacaaggatgaaaatacgctgcttcattcaccagatccccttgagggaagttatcttttcttggggtggagggggaaatgctcccagtttaaatgagcttccagttattcctaagtttggggataaaagtattctccaagggtttacttctgctttctctggcaattaatccaccggaccagctatggaccgttaaacagtaactgccttccctatgtcccatcaagttcaagcccctaaataactgagtgagatcatcttagattgctcatgatctaagtttcccaggagcaaagctatcctttctccatagggtacataccaagcaagatgacactgctcttcttaagcttttagaaaaatcagtgtcgaagtttcatgtagtcgcccccaaatctccccttctgcatgggatgtggatacttcacgtgagtctcctctttttgccattatatagctgcctcttgatcaagtccatgactatacccaaccaatgccattgaggcagacttgggaggacttcttaatgtttctcagaaaagataagatgagaagctgccgctttcactagagacacaagaagggagctctactgattttgagggcttgctgatcctacagaaatgtgcattttagatgttctactactgtcaaaattataaaatgatatccttttcatgatcagaaaacatatgccactttattcctatttatgaaataaaaatcaaggagaagaggattggggtgaaaagggacttgaaagagaagctggaggaatcacagaagtgccctaggagaaaagcaagattaggagctctgttacgaaacgcaacttctcccaaccctcatttatgtgaacatgaggggatggggaagagcaaaaatccatgtctgctcttgtctttttatttgtttgttgttttttaatcaatgagagtataagatccatctctactatgcccttcttcttagccctccttctttagcagaaaagaacagcttggttctaatgatgaaaatgatttcaggtttgccccatatttaaaaacccacagtaatttgctagtcataattctaaaagctatactatgagttaaaataaaaaactccttaaaacatgtttttaactaacagatgggtcacgtcaacaaaaccaaccctaagtctcctgaaaagtgtaatgttgagtgcttatttgtaagttaaaagttagaaacagcaatttactccttatccatggttactcactttggtatggaaacttgcagacagattgagacacaccgtatttcctaaaacctctggtcctccaagtaaccctctgggagctaggtgtttctgccttgacctccttctcttcaaccagacccctataaacatacatgtacataagttaaagaaggtacagatcttgaaacttgagtgtattcttgtgaaaggtgcactggtctaactattgagtgaaaagaaaaccaaaaggagaggagaggagaattaaggggagaatgaatgccctttggaatttagagaatctttctttttagcattgtgtgaaaaggatatctcaatccctaaagcatctgggaatacacatttatttaaagaacctgttcaaaagttgtcacaaaatgctaagaatataatgaagaagatcttccagtgacctggcagatattaacagcaggttacaccccacactactaaattatagctctattaaacttcccctttctagagagataaggagtgagaagtatgagcattaaccacatttcaacacaaacagagaaaagctgctaatgagagatccctctatcactttagtaactccatttgttgtttgagggagaaggttcttcatagtttttcctcaagcagatttgcaggaatggggttaaagggagtcacacaaggttagaatgtctacaagcctgaagtcgtgtgtactcaaattcatgaagccattgaaattgcatcagatcaaactgaagtgaataaaacaaaaagtgttcaccaaaactgatcacagagtaatcaataaaaataaaaataatgaattctaacttctcaatgtaggataagagcaaaagcaacaactttagctgactatgtaaaatatgaacacacacctgacaattcaccttcggtgtcctctatttatttggggctcacttccatcgtccctcctggacaacaaaaactgacccttctctccttcagcaaacctttcaggatgtgcagatgcagtcatagtccctctgtgacatttcctttgttctttccctggaaaaaatctctttttaattctcatagaacaagtttctaaagaaccactcatacttgtggcttctctcattaccaaaaatttcctcatacttctcttaaataggatataaattttcaccctatcaaatgtaaaagcttcacatttttctaaactttaattcacatacctagaagaaagtaatttaaaattgctacttgcctccaacagaatatctgagatgaggtttcaaagccattttacttatccagtacttattataacttcttggaaattaaaaaaactttagagaatcataaaagataaatgctggaaaagaccttggagctaattgtaactaaaagttaattttacaggtgcaaaagatcagaaagattaatgtctttccccaggccacccagatgagtacagcacacccaaggctggagttcatacagccagtttctccagccagtgcttaatcttgaataactgcagtgtggctcctcgtataatgtgaatctaaggtgtctttgactatgctgagcattccgtaggcacttaacatacagggctctcagaaaccatagcttggtagaggtttggactacagctatacctctactaccaaatgtctaggacacgttgacataaattcttgtgaagagtgaagtcaatggtcatcaccatcacagggatggtatgtttttaaccagcccaggatatggtacatagtagctgctcagtaaatctgtgttgagtgggtgaatgaatggggaaaaaagctaagtataaaatatccattttcctaaactcctttcttacttgtagaaaatatagtctataaaactactttctacaaagtaatggatttacaaagtaaattttacttcgtagaaaacagtctatacagacatacagtgactcaggtctcaaatgtattgagtttaagattctcccttgctttgggaaatctagaagagttcattttagccttagcaatggctaagccgttttcctgtctgcaatattctcactagttcttcccatatttacttgagttctagaaactgtattattttttacaggaggcttaagatctagttccaatattcatttgagagaacaaatgaattagaatgtgagatttacagcgtaactctcctcttccacccaacagacaaagtgttgccaatttaaccattttgtaccttcctcggcctctaatgagagaaagagcaaaatacccataatggataatcaggaaaaacattaagggacacatcagtcagaatgtgtaggtatgagatttgttgtaacagaggggcagaggggagaggtgatcaagggactaagagtatagagacaagacagtgaagctaagagagtttattcctctgaaacagaggagggagaatctccaagagttttgaaatgctacaagagattttaatagcattgtccaaaaccagaccctctcaaatgcttgagagatgactttctgtttgagtcagggttctttaaatacaacactaattgaagcctggatgacacaggtgtgaaagctttataagtaccatatctattaaaactcttcttatcatttgactggccctcaagtgggaaaggaacctcatttcacctccttttagacttgactctgacccaggataataactccatggatgtcaagtcattgaaatgttctctgctaaaataacaacacaattattggtaacacataaagtcactccatcatagaaagtgacgaaggcaggaaagaatattcttgtattgtttctgtaaacaatttaccctgaataagcagacagatgttagcccagatgcttcttcactttcctctgaagcatgcctgacaattatttccatatctccgaaatagtaagtgtgtttctaaaatcgatctattatatgttaaatttaacacagtctatggctaagcatcactgtgaaaacattcttttaagtaagtctttcttgaagactgtccctcttaagcttccaattgatgtgtttacatcacaggatatttaggcattggatcatttgatgtgctgagactgaagacaatcacttcatgtgctacttttccaactctaactaaataggcctgggtgtgggtgtcagctgtcaacttctctaggaaataacatgtatctagcctattggggagcttctctagtcccctctgttagctagataaaacagctgctttttggaagtctgggccaatggcctgcataattgaggctttgtgttctaaggcaattatggctagtttatggcagcagaggggttaagttgcagctgccttcagttcagtaggaggatttcaaatattaacagctgaccgaagagcactgtgatggggcaggtgggacgcattttcaagccaacatcccatttaggatcttcttccaactagcatggtgtctacactctgacgataagcctaaacttcattcataaattcagtgatgattgtacattattgtatttctttaatgatctacttagcgattgcccagtcttaaagtccaggagtcatggtgttcatcaatgctatcaatccaaacaagcgacttcttgttaaatggcagacataagattaaagccaaaaagtacatgaaggagggcactagggggagctaagaatttgtgagttaggtagccaagattgttgaggttggaagaatgaggaaagaaaggggatctgtggcaaaaatatgctattggatccacagttctagtttaaggacatgtctagtcccttttccagcccccagttaattacaatcccctgctgcccaaatggagagggaggttgttcaccagtagagggagccaggggctgggtgtctcaatagaaactgatctggtcccagaaggggcctttagatttaagtttttcggatcgaaggcagagcaaagtgtcccttacaaccaatggctaaaatgtatgccattgtagtagatcacattgttagttttctttttaaaaaaaaaaaaaaaatcctaatttaagcctctaagaataaatcacccacatttctggcattagcaatgcctgaaatgtccgggcttgtggaagtttatttgaaagaaaactaaaacaatcttagaaaatgttctttccaaggctaccaccagccaagactgaatctaaatgctcaattcagtaataaacaaagcctggcagctgggggtcagtgagagacaagcacaaagactgaggaagcctgcggtgactagaccctccctgtcagtggagtaaggggaagggagctgggagaaaaaaagacagaaatgggccaaataggcttctccacccagagggtccagaacctgctcccctaaatctgggtctctccagggagcagccagggtcttgcctagactgaagtgaatacctttctgttgaacatttccattgcacagctgtgtggggatggcttgttaagacttgagacacttgcataattcagaaccctttgggggatagagatcaattaggaccataaaaaaaatccttggcacaccagaggagagctgcttgcttagtaaaaattatgacattcacagcaaaacagcaatcctctaagatcattttttgtgtccatagagatgaagctatggagttggtgtgcatgtgacttgtgaatcaccagaaaatcttcagtgttttaatttcaaaaacaccttgactctctctggggcaaggggcgtgtcactgatcgtctctgtgccttaatttatttatcttaagcagaacaatttttaaataactaccttctttaccacttagagacatgtgaggtcctgtcaagtatttttcagaaagatactaattaagcatgcattttacggttactaatttagtacggtaaatggattatacttacaataactaggaagggctcaaagtatttatacaaaatcagtcaaaatgggataaaatgtcaagtagccacataaccttccaagatatagcaagagcatttttgtttctcagaatacagaggtcaatcccacatatctcaaaaggccaaacaagatcaagggtaagtggaaagtaaaaaaacaaataataattagaaaatggcttaaagagtcttaaaaggcttatattcttaccaatctgtattttgagaccagccaaaggggaatttctcacatacaatacagggtttctgatctaaaaactctattttaactggagaaagataactgtttaataatgacttttgtataaaatctctgcatcccttgcttcaacattttccaaagtgcatttcaaaacactgctacctgggattcatcagtgtttatacagaaaaaagttctgtggtcaaataagctttagaaacactcaatgaaacaatattaaacatttttattcactgtatggcttcacagaaatttttatatgctatatatattttcatccttcaaagatgttacaatcgagtgttccttaaacatttgatgacatatctaccctgcctgagcgcatctcctgggactgatattctacggaacagcttaagaatagtttaagaatcacttcctgcagcattatttcaagatcagtcagaacatggtattttcagtcttgctagttgttaagtaatacatactgaatgtcactctaagatatgtagagagatttctaaaacccaggggaaacaggaacaaaagaagcagataacatgcctttgttctatggctcaattctttattacaataatagcaagaatgccagaaatattattcaagtctctctctctctctctctctctcatatcttcaacctccacttctacccaaaaaatctttagaacactggacaaattgaagttgtctcttcctttccatcccactctctggatactgtatagagagaagcggccaacaatgagcaataagttcaataaacaaggagcctagataattctttgaactagctcatcagtctctgagctgttaatttcctgctttatctttactatcattaactaaccaagatcgttggccaaatattttctttgagcatttgctttctcaccatcaatagggagctaatttctgtaggaggaacacactgatattctggtgtaatttactgaatgaggaattacttagtttatctatgacactcagacctcccactccatacaatttactatttctcttaggacattactctgggaattatctttccacttcacaaagttagtgcctggaggtcagtatcccgtaagtggcacagttgagcaccctctgctttcagaaaataagtagctcatagtcatctaaaggagaagggagaaattcaaacacatcattaatggttataataataaaagctatttgttatctaacaggaccagatattgtgctagtcccgttatctatattccccatgtcaaccctacaagaagggtgttattattcccaatttaacgatgagaaaaactaagcctccactcgttaagcaaattgcctagggccacacagctaggaagaggcagagcaggttcttctatccaggtcacagtccaaagtccatggtcttcctgcccgcctgtgctgcttctcatgatgtcttgtcctatcatggaggaaaaaaataaaaataaacttcctatgacaacgcctctgactcataaagaaagtgagagaattctagtggctctgttcctagacactgcttactggctctgtttcttgtttaatacagtgattttaatttctttttcttttttgttttttttaatctaaaagcatgctgtcatttcagagccaaaaaagtaaggactgtgtaattagaaaagaaaaaacaaacaaacaaaaaacaaaacaaaacaaaaaacatcatttctccctagggtaatttttaagggctaaaagttagtccataaactctccccaagtgaagacaagttgcttggcaccaatccggtaaaaagaatgacagtctagcatgtcattcttaaggcaatagaaatttccatgattctatgagaaacactagagcaaaggcacttcggcacattaaatgaacttgtatctagctccccagattattctctttggcacgacttttaccataaaccgtagccagatgatgacagtaaacatgacttaaatgtttcccccaagccatgagagtcacctaggaaaatgtctatgttgtctacacctgctgcttagcctgcagtgagagtatatatagaaataaatatacctcaagcccttcctttatcctgtgccaaagacaaaaaaggaaacaaagcctagctttttcccccatgctcacattctgttatgctttttggcttttgttcttgatcttccctctctgcttgtagtatttctcacttaatctactagattaatttatactcctcttccaagattcagattaagtaagtatcttcccctctgtgagaacatgcctgaaaccagcctaacccaagctgcctcgtggatctccttcagactccctagaactctctgtacaagccctgccacagttgtctccattctataatggcatgagtttaatttgtgtatccacctccataaagactgtgagctccttgcagaaagatttgtgtcttatttacctctgcaacctcaatgcttggcacataataagggcttaataaatgtgaaaagaaaagaaaaaaatagaggtaggggaataaaataagttgacggtgaataaagattttaattgtgctactctctgtccccataaattgttctaaaaagggacaatttggcctaagttcattcttgaagccttgatgtgattggggtatatctagatatggtagaaactcctttccattctgaaatattccttgatgaaaatgaacatcttagaaagaataaaagttctgaataaaatttagaatatcctgatttctttaggacttcatgaaatgaccaacactaccccagtcttccgtgtggttttctgagagaaccaagaaccgcgcttccacattccacatctccctttcctccccatcccatagcataaatatgtgctctctcttgctcactctttctctctctgtcacacacacacacacacatacacatacacagtgttactaggctttgactgaactctgcagctaaacatggggcataagatgaatgcctaatggtattctaatattaatattggtgctccatataccaggttacacaaagaaaaattatttcccatgtgaccattgtcccaggattgttagtaccctgctcaaaaggatttaatggcattatgaaatgtagaacaaacactttagcttgacagtcgagtctcacaacctatctcaccccaaagcttcttttcatcttcacctccctcaagtctataaacaggaattaaatctgatgggctactactcccccaaacattcctttttcctttctctacagaaaatgtcccccattctcctttcaacctgtcagaataaccataatttcaaaatcctattaaagccttcatcaatattataacaagcactgatccttccctattctcaactaacaagcagttactctaaatgtcagtaatatgtcacctatgcactgtattgaataagtcaggactgtctaatagaactttctgcaatgatggaatcattctgccttctacagctgagctctccaatatgatagccactagccatgtatggctactaaggactttatttttatttttaattttttttttgagacagagtctcactctgtagcccaagctggagtgcagcggcatgatcttggctcactgtgaccttcacctcccgggttcaagttattctcctgcctcagcctcccgagtagctgggactacaggtgcacgccaccacacccagctaatttttgtattttaatagagacagggtttcaccatgttgcctaagatagtctcgaactcctgagctaaggtgctctccccacctcggcctcccaaagtgctaggactactaagcactttaaatgtggctaacacaaatgaggtactggattttttacattttattttaatctctttaaatttaaaattaaataaccacatgtggctaatggatactatattgaacaagaaactatttaactttttatatgctatggtttaggtcccttggtgagcatataaactactgaaaaaattgaataagatatgcttttttctatccccagtgaatgctatgactgcagtagtgttcattaaatgtcatgttcaatgcattgcctgactacagggtcttttgccaagtgttatgttattttaaagaagtcttcttccctatatctgtaattttaataatattgtacaaatggtgtttgcctcctttttttcctttattttagtggcttaaaatccctcagaatgacaccctatcactgcctggattctttatcactatataaacaaaatgggatgaggaatgaaaaagttccattattcattaccatctcatttcttttccctttggggaaaaagcatggtttaaatacctgctgagacatacaattgcttcagtcttcaatatgaccatttctacagagacagactatacctgggtatcggaaacaaattcagctcacagatttttgcttttctttcctcctgaaacctcaccaccttttaaagaaaagtagttctttatcatagattttcccagagcatttttgtctctatttctgtgttctgcagtggacaacctgaaacactgcgaagaaggctaagctctccgccagcaggtcagcggaggtagcatgtcttggaatttgacaatgatgtgcccctggcacttgctggcttaccaacagcccttcaggaatcatcatgccaacaggccaaccatgcaataaaatcctgtacctggcaaagccatgagcaaagtgatcaaacattctgtctgcagattagattctaacctattaataagccttcagaaaataagccagagtgaatctctaacagcaatagtttacagagatgtttaatgatgtcagaggtcggccaccctacgtgctttccttctgactcagcacagagcaggacaagggcaggagagccactccagaagccagggcaatcagctgtatcttttccattcgcagctaagtttacttggaatgactggaaaaaccttcaatgaaaactctttctaaaataataaaagactttatcctgctgtcatgagccagacaacatcaagaaataattatgggtgtgtattttcctctgccttgtaaaatgtttacaaattgtatcataagaaagctctagagtcaatggtaaagatagcaataacatttaacttgtaaattttttatatctagccataaaagaatcaccatgtgtttaaatcacatttgaatacatataaataaaattctcatctgcagacatgagccagtggctaaaggaagaatccatgactccttttccacagagaaagtacactggagatgtttagcttctcatatttatgaaatagaattcattgtcaccacatcagcaaaagagtgttgcaaggatcttaatttgggaactttgaaacatgaaaataatctataattaatgatgataataacctttgtggagaaacagtttgctacatttattttatgtacattccttcatttgaatttggtagggaggggttttatctacaatttacacataaggcagtagaggcttagagagattaagtcaatttctttatatcattaatatcgtgagtgttggggctggaatataaatctggatcatcccatccctgaagtcctcttctttctactaatccaggctgaatcttaacaaaatcacatccagaaatagtttggagcatcctggtagcagaaaaaagaaagtgcagcaaaagaaagcggactgacctgcaaggtttgcttagggaaaagtgattgagaatgtgcttttcaagaagagaacccaaactctcctcaataatatggcagctaacatgtcttgatgggctagtcagcaggaatagttttgtaggttatcttctgtatagtttatgattttaaaggacacccattttaaacctgtctgtaaatttttaaatgatagttttaaatccccctttttatttaatgcccaaatgtgtgtaatttatgcagacaaaataaaataccttaaattatctatgggaagctactaccatgacctgaataaaaagcactgaagttagcataagaagccctgagatgaagtcccacttttaccactgaacaacgcagccatcctgggcaagacagtaagtcttgccaagtctttgcttcctctgctctaaaataaacttacctctcaggattgatgtgaaagttaaataagataacatgtaagaaagtgtctgctagtcagaaggtgctcaataaaagtttatttaatactaatgaaaaccaattattgaatgtttaattaagtgccagcacagcggtcatttaggtgagcagcagcttcaagtgtcgctgtctacgtgttgcaaataagggcactaagaatctctgtgccttgtagctcatttaatgaactctttactatgccagagtcctgctgtgcattggtcatggtggcagtgtaaactatttatgggctgattgacatttttggtcttttttttggttttggtttggtttgggtggggggttgtgttttgtttaattgttctttgtttataccaaatggcaacagttcaatctccccaccagttcccctaaaaggaaattttcctggttgcacaatgcctgtccagttcacgggcatctctctcccttcaccatgtcaatgcacagtatatatagagtccacgtgtgggttgtgtatgtgtctgtgtgtgtgtggtgggcagctgtggcatcaccaggaaaaatgtggctgttctgagtgtctcatctaagatcttacctcatcccgtgagtttctggagttttgtgctgctgtgctctacaacactctccttgaggctgccagcatcctagatgcatcctggcccctgtattttgatgcatcaataaatctccttaagccctgtgcatattccctgccatatttaatgtcagtgtaccagagtccttgtattagtcagggttctctagagggacagagctaataggatagatgtatttatgaaagggagtttattaaggattactggctcacatgatcacaaggtgaagtcccccaataggccgtctgcaagctggggagcaaggaagccagtccaagtcccaaaacctcaaaagtagggaggcggacagtgcagccttcagtctgtggccgagggcctgagagcccctggcaaaccactggtgtaagtccaagactccaaaagctgaagaacttgaagtccaatgtttgagggcagaaagcatccaacacaggagaaaaatgaagaccggcagactcagcaagtctgctctttccaccttcttccgcctgctttattctagccgtgctggcagttgattagatggtgcccacccagattgagggtggatctgcctttcccagtccagtgactcaaatgttaatctcctttggcaacaccctcacagacacacccaggaacaatacttggcatccttcaatccaatcgagttgacactcaatattaactatcacaattctaccttacttgatttccattttcctgtcagaaatgtcctgacttttttacctgtgtgtcttaattaccaagaatcagtccaggttatcttaagaaaatggctctaagaagcccaatgtgtctgggaacattggctcacacctgtaatcccagcactttgggagatgaagacaggtagatcacttgagcctaggagtttgagaccagcccgggcaacatggcgaaactccatctctacaaaatgtacaaagactagccaggtgtggtggtgcatgcctgtagtcccagccactcaagaagctgaagtgggaggatcactttagcccgggaggtggaggctgcagtgagctgtaattgtgccactacactccagcctggacaacagagtaagaccctgtctcaaaaaaaaaaagcacaatgtgagaataaaggaaattacaagctatagtggaagatattttagttcataaaaacaaaggaagaaggaccataagaggttttttttaagacttatcttctcaagttctattatctcagttttgtttggttaggacttccatgccaacctcatttattcattcattcaatagttattgagacccaccatgtgccaagccctgtgctagatgccatgaaggatggtttctactgcacccataggttgcagttgaaaggcacagaaaccagtaaaaagccacttagagaacaaatgcacggggaatgtgaaaacccctttcttccttttagtatggaagagaggccactttttctgcatttctctgagccctccctggggcaagtgtcctctcacatcatacccatctctacccagcagaaggctctcactcaaggactgtcaaggataactaattcaagacccatcccacccactaggtgccaaaaagctagcaagtcagctacctaataggtgtcttttgagacattcaacacacatagatttaaaatatacaaaacaggaaactgtctttacatggtagtctttcaactaaaatggttacaagatcttaaatttgttgccatcaaggtactatacaatgaaaactggtggtcccagggatgaccctgaaatactgtgaggtcctgaggccctgcagcagacagaggcacacagcattcagtaaacgctcattgggtaaacagtatctgactcgctggagaaaaactaaattattgcaagttgagttttagaagtaaaatatatttaaagtgatatttcatttatctaaaattctaacttttgacaatttcaacttcatagtacacaattgaggacaaaaagtaaatcaaaagtgctcagagaataaaagacaatggtcattaaggtttatatttgtaagcagtcatgtggagtcttcactttgagcctatttacctttacttcatgaataatgttaacacacgtggttctctgagttctcagaacatagccaacttgaagcactgacctagaaaaaggagaggagctgcaacaagtaagtgcactgacagaaggaagaaagaaaagtatggaggcctaacaagaaagtaagaaaaaaagaagctatacaaacacaagaatttagaaagcaaaatggcattcactgtggacacaaatagttgtacgatttgaggacatctttaaaagaatcactgaatcacagctaattataaatttattgacatatttggtagcatcttttaaaaatgaaaaacattatgtattttaagtatatatcaaaagaagtatattttgatccttaaaggtataaaatatcagctattgggaaaattttaattatccaaaccgtctcatttcctaaagattgtggaaagttgagtttattctaatatgtgtgtgtctatgcaaacacacatgcataaatgcatataaattatatgaaatagaattcctgttaagctagaaaacctcatctccctaacacacagtagaacacattattaactttttggttgtcagcttgacatgatcaaagtggttatctaaaatcccaaaccttaagtttgtgctttcttttcattgaatgcaaccaagaccagggaagttacttcactggtcagtaactcaatttatctatttgtataagaagaaaaaaaaaaaaaaagctttcctcacaggggtctgttggactttgttcctatttcaaaacttgaaaatccttaatataaatctcaataatagctcagtttagggttattattttttaagcaaacacccgtcaaggaaaagatgcaaaggcagtcagtctttccctgcttttctttccttacaatctttcttttccaaagaacacaataaagaaacaaagagccaaacacactgactcacgtctttttctaatagtgttgtggtcaatttgctcctgcataaaaaactagtagttaagctttgaactctgggttttggaaggccaagagtggaaaaatatctttagcagaaagaacagcacattccaaatctgtccgttgttatgcatttgtgagaaaagtccacttgggcatgccatccccattgaagcccttttgtgttgtcagaactttcttgacaaagaaatggctgaacattgcctttcagtagaatttcgagttggtttttctgtactttcttttatcagaacttcctcattcaaaccttaagatggtttctcagcttgaacttgcttttaggacaaataggaaaatggtatagctttgtacctaaaaaactgacttcatccttttatgggaggaaaagatctatatgcttcagaaagccaaagatgtactgagaatcttcactaaggcatttcctacagtaaaattgatgatcgcatcccaagcttgatcagatgtcatggcttttgttttcttagacgttgtcacaatctaacatagtcatgtgactctagtgtactaagggctttcatgggtgttaactcatttattagacctagcatgcacctgacttcttaattattttacagttgtttcttggttttgattctaatttttaaagacactcacagtctgaaaaataataatagtattgttacatttctaaatggctagcggcatcttttagctgataagactgagtagctggtatagcctacatatcacccagttgaataatttatttcagtactaaaatctcattacctaaaatgctctcaggaatgtttcaaaagtgtctttactcttttctccccgcgaggatgaaacaccctcaacttaacgcatcttagcttcaggccatcctgtctcttatgccttccctcctgatacagtagaggagctatttatcttcattcattttccctcacctcttctctaagtgcccctcatcccatgcctcctaccctctggagactttactcttaattgtttgcaccatctgccacacatagtgttctttcttggtacacaccagattgtgactcacccctgtttaaaacctttcagaggaccgggcacggtggctcacacctgtaatcccagcactttgggaggccaaggcaggcggatcacaaggtcaggagtttgagacagcctgaccaacatggtgaaaccacgtctctactaaaaatacaaaaattagccgggtgtgatggcatgctcttgtaatcccagttactcaggaggctgaggcaggagaatcacttgaacccaggaggcggaggctgcagtgagccgagatcgcaccactgcaccccagagcaagactccatctcaaaaaaacaaaaaacaaaaaaaaaaaaacacctttcaaagacatttcatagccttccactggagtcctgaaaccatctcaggccttcatcatctgggcctgcccgtcttctcagctccattccttgctataccatctgctgtcaccagccccaccctgcactacagttacagctctctttgaaattgtcagatctcttaatttttagggcttttatttacaatgttttgttctctccgcccagaacaccctgccttctcatcgcctcttaactccccaagcattcccagaagtctcctttgaccttctggcctagataaagtggccctgccctgtgctctcacattgccagcatccttctatggcatctaatactctcactgtttctgtttaactaactgtctccatggctagcctgtaaaccaagttacagcctgatttgagtctgccttaccaaccagtctgtccccagcacagagcctgaaaccaagtgcaggtactcagtgctgttaatgaaagaatgaaggaaggataacaaatgatattcagagaagcagatatcagagacaaactggcagatacaaaggtcaaccaagggtctaggaaaagtgagtggccaaaagtctaatcaaagaagtcagaaaacaagacgtctttagcaaccaacagtgcaaggcgggaagaacaaatctaagacaggcccttagcaataatggtaagcaaacttgataatcacatcactcaatcagtccctctcattctcattgtgggcaaagtttcccagagtgttttaaagtgtagtctaaggactacctgcgtcatgattccacatccccactagctctactgaatcagtctcatgggttgaggccagaaatctgcatttcaagccagcattctaggtgattcttacgcatcctaaggtcttcaggctggaactggagacaaaaacaatagctagttgactaggaagaacaagaccagaaagcagatgcctttccctgatggtggttagttcagccctgtgagcccccagttgcttcacatgtagtatgtgactcatggataaggccacgttcaccctgattcatctatgatgagctaacgcctagctggctcgtggttggaccttagaagtttcaacaagggtcatgtgtacgtggaggagccagtgctttcacggcacattagtcacaactcccacttaacttctcacggctgcctccccttccctgtttgtggcatgggccagtataatccatctgtgcattctctctgggcagatgaatatttaatcagcagtgaataaaacaatattcccttgtccaggacctggataaattgctaataataataactatcacatcattctaagggaatactcctctgaggaaaacaataatgtcccgtttagccccactgagactgtggttttaaagccctaattttgtattattgacaaagaaaaataagtagatatggctggctcacaaaagcatctagaaagttctatggcaaaaaaagaggttcacctgaaattagtattccttgttttgatcttgtgttccaagcagtctcattttttctcctgggtttggtatatctttttgtcctttatgatcatgtccataatctgccatgctcaaaatgagtccagaataaacactcgatttctgtttatctgctattatttatagcttacggttatcctttaccttcctcccgagactctgttctattgctggccatttgaagtcagcgtactgcaccttaaattccctatgaaccagaatatatgtgatgtgggcaggaaaaacaatacatattgcttttcccagagtagtttgaatcaaaccttttaggtgtaattgaaaacatatttttacaagcaaatagagccaataaactagaaaaactgtgtggaagcaccaagcccagcttctctggtttttaataaactgcagtagagaaccttaggaacaggaagacatttacattccaacccggaatcacgcaggacaagtgagtgtggtgcgtcacaagtgctctgtacagaaagttccagcggggaaagaagaggaaattcctaagggcactgtggctttgcataagctctccaaagtcagtgtagggacctcatatgcctttatacaggtggtatgattgaagggggaaagcatgcctttttctacttctggtcccaagacctgaaatcatgattatcttcctataactattattttttaaatatagccataaaagaaatatcctcctgagacaggtccttttctcaattgcagtgacataactcccaccagatcagtgggacatcatctcccatcatcgttgttacatccttgcagtcagcctagcctttccagcccctaaaaccggaagtctgtggtggtgcaagggggctggcaataggtagaaggattctgggctgagactgaatccttggcttacacttaattgttctggcatatgggcttctcctataatttctctagctatgaattggggtggacttatttacacatttataaaatggcaccattcattaatcattaaagtaaatcacctgaggtataagaactaattagaaagcttaaaatagaaataaagtaagagctttttaccctagggctgggggcagaaccaatttctaaattataggtttttactttatgtacatgttaaactccagggaacatgatctggcccaaatttgtttaatagctaaccataatgtcacaggcttttactgtttgaaaaacagagtggcatgtataaaaacatcattttcaatgtctatgtcaatttttaaaatacacctcatgcagtgctggaaagggaatggaaatggggtaatgatcatatactgttggtaagaggctaaattggcatgggtgttagacggtgaattagtaattccaccctaagaagctatccttctcacatgtaagataaacgtgcaaagatgaatatgtatgtcttaggatataaaaataatggtgttcatcaaaggatacaatccacagaataacaagacagatgatagaattggagaaaattcttacaaaacatatatttgataaagagttaatatccagaatattttttaaaaactcctacaactcaacaacaacaacaaaaagaaacacaattcaaaacgaacaaaagacttaaatagatatttctccaaagaagatatacaaatggtcaacaagcacatgaaaatatgttcaacttcactaatcattagggaaaatgtaaatcaaaactgccatgagatgtctacctcacaccgactaggatgactagtatcaaaacaaaaaacaaaaaccagaaaatgacaatttttagtgaggatatggagaaattgaaaacttgtgcactgttgatgagaatataaaatggtacagctgctacgaaagacattatggcagctccttaaaaaaataaaaatagaattagcatattatccagcaatttcatttctggttatatgctccaaagaactgaaagcgaggtctccaagagatatttttacaatccatgttcatggcaggattattcacagtagccaaaaggtagaagcaatgcaaatattcactgatggatgaatggataaacaaaatgtggcatatatattgtattaaatattattcaaccgaagaaaggaagaaaattgtaacacgtgctacaacagcttgaggacattatgcaaagtgaaataggccagtcacaaaatgacaaatactgtatgattccatttatttgagatacctagagtagtcaaatttatggatagagaaagtagaatgatgtgccaggggatgagggaaggaggaaatggggagttatttttaaatgggcatagagttttaattttggaagatgaagagttctggagcttggttgcacagctatattaatatatttatcaccattgaactgtacacttaaaaatggttaatatgggccgagcacggtggcacgtgcctataatcccagcactctgggaggccaaggtgggcagatcacttgaggtcaggagtgtgagaccagcctggccaacatggtgaaaccccatggctacaaaaattattttaaaaattagccaggcgtggtggtgagtgcctataatcccagctactggggaggcggaggcaggagaatcgcttgaacccaggagacggaggttgccctgagccgacatcacgccactgcactccagcctgggcgacagggcgagactttgtctcaaaaaaaaaaaaaaaatacaataatgttgttaattacagtaatagtgaaaagatagagaaaacatgcaagtctttcaaatgagaaatagccattgtgtagaatcccatgcagtcactgaaaagatgctgtacatatgcatgtatgaacttggaaggatatatttgatctatcttttgacttgaaaagcaattttcataacaatgtacttataatgactatcagattactaaggctagcacgacaaaatgcaacaaactgggtgacttgcaacagttctggaggccagaagttcaagaccaataggccggaagggttagtttctgtggagggctgagagaaaatatctgttccatgcctccactagcttctgatggtttgctggcaatctttagtgctctgtggcttgtagataatgcatcaccccaatctctgccttcatcttcacatggagttctccctgtgtgcatatttgtctctgtccccaaatttcccctttttataaggaccccaatcatattggagtaggggctgcttaaggaagaaaaacaatggtatctctgatccggatgcattctttcgactttctcaaagatatcatgttttcactcccggtagatgactccactctgacaaatgcaggtgtaaaaggatttcggatatttgatcacaagtcctgagaataatgaggaatgcttatagagaatgactaagtattcctcaacagagtcaacacctattatagcccactccttactttaaaaaaataatgtttttaaattttgttttattgttttttgagaggtgaggtctcactctgttgttgcccaggctaaagtgcagtggtgcaatcagagctcactgcagcctcgaactcctaggctcaagcagtcctctcacctcagcctcccgagcagctgaaactacaggtgcaggccaccaagcccagctcactcctcacttttactaacccggtgccagaacagggctcactccctttgctgtttgctctagggcctctcaaaattgtcgtttcctgctctatgttttgctaatgttgggctgcaaaattcaagcaaataccagttgtttggggattttttttttaaaggaattctaatccaagcgttagtggcagtgttttgttttgtcttttcgctgtggtaagctctataaatttaccaaattccaatgcaagctgatgtctaactctttgacctttaaatcatattttccaacaatacttactgtcattttccctatttaattgatttctgaaattatgagaaatctatactagaggaaacaaactatgaaagaaagtagtgaagatggtaaaatttttcccatggagagagagagatctgcatcccttattgaagccaggttttgttttttggggagaatatttttaatcttaaatttttgtaaaatttctccacacatctaagaaaaatgattaatgtaggttattttttaatgcatactatctttgattaaatctatgagttctatcaaattatgtcctgccctaccactaataaactcccctaccacagtttcctgcacacaatggacactccctcacaattcattgatttgggggttgggaaggagttccaacacaaaaggcctaaccctagttaccaaatactcagtgtgcataacagcaacgttagcactgagtctatccatgggaccaaagtggaatttctaagtacattctcccatcatagaaaggacatggttaaacagaatccactgtgcaactatacaattgtttgttgttcactattggtcttccctcacttgaatggaagctctcaagagcagggactttgtttttgttccctgctttctgtttccccaaggcctggagcaatgccaggcacaacttagggcctcaactactatttgttgaatgaattaatgtaacaagatatttttctccaatcacagctttcagactggctctactaagccatcttttgctgtcctttaatgacatcttaggtagattctataacttcgtggtcactttcagcaattaaaggctcaatcccgtttaaaactgcacatgtaccctaaaacttaaagtataataaaaaaaaaataaaataaaaaaaaaacttcaacctcaaattcaatgcaaatctttcttctctcccaccaacagctatatttgtaccctgctcttttactcctcctcccagctcagtgccctgttgcagatgctgggcatgtcccgactctgacatccctcttcccacttccctgtgtggagacctaggtcctcaagtgtttggggatgggaggggagagaagaaagggactagctttttaaaaattgtattcaacctgctatcttcaacctgctttccatcgactgaagaatcttaattgcatagtatcaactggctgtcaaatatttatgcatggccatgcagccccagtgctgcttctctccaggacataagtgggagttctttggagaatgctggagggaatgaaggggaggagtgcgcctctccactgcatttttccttgaagcagaaacttagcttccaacgtccttcagatgccaggtcccacctgcagcttcttgctctctcctgggaatttcagtccagctaccatctctaaagtccacttgactcccaagaaactcacacatcctcatcacatccaaaagtgggatgtgagcttctccatgctccctcatccccttccatgttgccatttctcagactagaagtccaaggagcaggtgccaggctctctccttcttgcatgtattctcaactctcacaagagagcttcttgcagctgcctgcctctctactcccagcctctcacttggctttgagaaatagaaagtactcaccatctcctccctctcacagaaaagcttctcaccatgatcgctgacttctctacaggcagatggttttagtctccaactttcccccatctttatgtcctttctcagataacatggaggagagggaaagtgttaggtgtctttgccatagggctggttcttctggggtctcttagtacatctacctttgggtataaggagcgattggtgaatctttttagacttgatcacctttctgttttcaactgggaccacacacaccaatttcagtgcaacaggaaaagtcccatcagcatccagttacttatgccacataaaatattgccttttatattcactcctctctcaggggctagcatagtgccttgttttggaagcagtggggagacaaaaaatacttgttgaattaattctttttttttttttttttttttttttgagacacagtttcactctttttgcccgggctggagggcaatggcacaatctcggctcactgcaacctccgcctcccgggttcaagcaattctcctgcctcagcttcccaggtagctgggattacaggtgcccgctgccacacttagctaattttttttttttttttttacttagtagagatggggtttcgccatgttggccaggctggtctcgaacttctaacctcaagtgatctgcccgcctcggactcctaaagtgctgggattacaggtgtgagccaccacgcccagcctgaattaattattgatagagcagtaggtgcctgagatgttgatcagaaattccaggcttccagctgaaatcttctggaagaaacctgtaggtgtgatgtctggaatcctgatgaaatcttggagacttcagaccactgcatgaatatctaaaccccactctgaaccttcacaaggttcttggctgcatggcttccaaggtgctctaatcatcaaaatatctcccatgtgaggaaataacagggacaatattttaaaaattaaatccatacttagaaggaaattaaaaatgaaactgtttgataatgagacagtctttcatctctgcttgctgcaaggtccttgagctccttgagcttcaaaatgtctcagctcctggcatcgaatgccatcagaatactgaagcagaacatttgttgcataatcctccttcttgagatttgattcatatcctgggtcttgtcactgggttgtctttcttccacactcagataaagtgggacagttgatatggttttgctttcacattcacagtttcaccaactttttgggatcctcctcaaacacattagacacatgtatctgtaatatacatccagggaacaaaaatttagactagtgtggaaagttaaggtgggggagagtggattaatctaattttgtttgtttccactttctgttgaaatttgtctcatatgcttatacaacccacttccctctctgtccttcctttgttccctcactattaaggggtaatatctacttttctcaaagaaatgctataggaactaagtagaaaaatatttgtgtaatgaactttcaagtttatggaagaaattccctttgctctaccaacaagttctcaaactaaatacatgacatttggcaagccttaacctctagtctttattttccttttctatcaatacaggaccaggataatttattgtccatttattatttattctgcagcatgttctgtggagagcatttattatatgttattattttattttgtattcattatatgtatatgaaaagaataataatctgcattttgtacatgaagaaacagattcaggaaggttaaataacttgcacggcatgtggttttggctagtcaatgacaaaacctaaatccaaaccctcatttatttagttccaaaccctagttcttaactcctacagtttcctatcaaatgagctctgagcttcctaaactattcctttgggttccttgttttgagccatggaactattttattttcttgtaagaggcatcattaagcattttttgttgctggttccatacgtaataaaaaatagcataccttaatttttgcaacacttttgtgttgtgagtgatggaaataaaagaaatatcaggaagatttatcttctttgaccttaggactcaaaaatactctacttaaacaagtggggttttgttgttgttgtgtatgttagagattccctcagatacaggttgtacagctttccttagaagatcatctgtcgcttacaattaggaggaagaatttttctctgtctgatgtggctctcttctattctaacgtattgtcagtactttagagtgaatttgatcactttttcctgttcctttcttaagacaggaactaataagacaggatgcgcttaagggaagatacagaagtattgtgttgagaaagcacaaggaatgttaattctttcttgtaattagtgtttcagtggttgtctgtcttcacagattaaaaatagaagaaataaaatgtccataaatgggcaggtgggtagctcaagtcttacataaaagaaaaacaagtgcacttcctcatttactcctctttcaaataacaaatattcagtatcatctctgcctaggtttttatctccttgtagaaataatgcataagaaattagctccaactgatagatacactgatttcataaaaaaaattatctaatatgcttaataagaactattttctccatatgagctggaccagaatgtgaaaaatgtccatcagcatttgagttaataatgattttcctatcagctaagcattcagtaaaagggaagaaatatttgaaaagataacacagcaaatttaaaaaaatagaaatgagaatttgtagacctccctttttttaaactttggcaatgctattataaatagcatttttaaaaactgtctggctaaaacaaaacaaatgtttcctgtcagtgtggaaaaagaaattcctgactaaaattgtgttatcaggttttcggtccatttaattaggaaagctgttaaatgtcatgctacatgtcatcaaatgcccttttaaaaaatgatttcaatttttcataagtttattccaacttttgtgttttcattatttaatcccccttggggatttcttttaagtaaagtcgtcatttttacaagtgaaaaatacactattcttgccataactacacatcagacttaaaaatataccagacttaaaaagaatatagaaacatatcgaagatcaagtcatcttctaaaacataatgccatttcacatgtatctttaatatttacttttaaggagaaaaactgagatatggaaactactagagctgagctctaattaagtctaactctaatttttcacattaaaaaaacctgaccctcagaacttgaatgaaaagaagtttataaagttggtggcagatgatttcctttctgcaaatccagtgaacttactttactaccatactgttcagaaaaaatttaataagtagctgtatagtaatatgccaggcacagtatcagcttctgttgatacaatgatgaataacacagggtgtcaggtctaaagaagttagaatctaaagaagagtaaaataaacaaattgacaagtaaattactgcataacacattacttacaaacttaacagcataaaacaatacacatttattatatcgcagctttagtaggtcagaaattgggcatagcttaactggatcctctgcttcagggtccctcacaaggctgcaatccaaggtgttactgaagctgaggtatcatctgaaaattcaactggagaaagattcaccttcaagcccatatggctttttaagaccttgtcttaaaaaaattatatatatatatatatatatatagagggagagagagagagagagagagagagagagagggacaaagggataattgggggatatgttagaatttatctgccacataaatttacagtaaaacatgatcaatgctgtgacagagaaaagcacaggggcagtagaatcacaggagatacactgtaaaccaaactaaggaggttgtcatttgagttgaattttaaagaatgaaaactcattagatcaatggaaaaatgaaggtcattccagacaggagcagggtctgtaaatgcattgagtcattaaaaagcaagcattgttaatgtctgtagttaaattggaatggcataatatccattaactgagataattgagaagaattatgtttgcttagaatcagcaaattttagagtttaagactataaagggagaaactaaggctcagagataataggtctagcaaatgatatatattcaataaatgatgaataaataaatgaatgaaagaatgaactgcctttgtagtactagaaatggaattccacttccatatcctacataataaccatataagtcaacctctatctctttaagaaagataggagagacaaaattacaagtgctaaagagatcgacagagggaagctatgtcacaaccagaacctgacggagcagaaacaaagtttatatttcatttctaatatctaattgccatggtgtgatccctgctctttgaggggtgggcttgggaggagaaactgctttatagatacatagagtaatgatgaaatttttacaactagttctctcacttcattccagcggaaaaaatgttttctagagccttcttgaactacaaaattctgtataatttctgactcaaaaacaggcaatacatcacctccaggacccaaagaagagatggtttatatttctgtagattcatatctgactcagcatttttgccttggtgtgaaatatatacatattcttgtatttagctaaagagtttattttgcaatgaggtaaagacaaggtagcattaaactgacactagcagtaatcactaaaaagaaaaatatttttaagtaagaaccattatgggaagttttttgagccaaaaatgaatttagtagtaacagccatatctcttttttcatctcaagtatgtttgcatgaaatacattgaatagaactacacattcacgattcttccattcatgtgaagtcagacctaataatagtcaaatttagtcatcctttgctaggttgatgagtaaacatacttggaaccagttttttggagagaaagctggtgagtcttagagcctgtaaagataccctttttcttattattaatattagttttgattgataaatcataattataaacatttatgtggtacaatgtgattttttgatatatgtatacagtgtggaatgattaaaccaaaataattaacatacccatcacttcatttagttgtcactttttgtggtgagatatttgaacttcgctttcttagttattttgaactatacaacacattgttattgaaaatagtcaccctgctgtacagctaatctcaaaacctcttcctcctgtctgtgcccttttcatcaacaagccctcatttcctccctccccataccctcagcccctgctaactattattctattctctacttgcatgagttcaacttttttagagtccacatatatatctatggctggtttaaggtactcccattcactgcctcttgagatggtgtattatttgccttctttccttccccagttgtagcacattcaggctcatccggggtgtgtgtgtgtgtgtgtgtttgtgtgtgtgaatttgagtaatgtgtgtgtgtgttagagatgtgtgtgttgggggggttatttaaaagtataactcctttctgcaaattctctataaatctacaactgaatcaaaatcctcaaggaaaaaaatttttaaaagaatatggagcatgaactaatgggaaggaagatgatctcaaaggaataggaataaaattattaaaacaaatatgaaaaatacaagtaacaagtaagtttatgtgatttcaaaacattgtttgagaggactgtagagaagataattcttcagatgtggtaaggctcaaaaacattttttaatgtctttgatgagaggatgttctaaggtagaaaacttaatgctcttgatgtgtacatcagtttttttaactaacaaaaaagttacatatatttgtggtttccaacatgatgttttgatattaacatacattgtggaataaccaaatcaagctacttaacatattcattacctcatattttttgtggagaacacttaaaatctctcagtaatcttcaagtatacaatatgttaactgtagtcattatgatgtacaatagatcccttgtacttgaaatggtgtgtcttttcaccaacatcttcccagtcccccaccacctaccccatagtaaccactattttactctgtttctatgagtttgacttttttatactccatgtaacaagtgttacgaaggatgtggagaaaatggaaccattgtacattgttggtgggaatgtaaattggtacaaccattatgggaaacagtaagaaggttcttcacataattaaaaatagacctaccatatgacccagtaatctaccactgggtgtatatatccaaagagaatgagatcagtatgtcaagatatctgcacccccatgttcattacagaataactcaaactagccaagatatagacatcaaattttgagaaaagcaagtattcaattatgtagaatatacccaacctgctacaagagaaaaaagcaggtgtttggaaacttcattcaattttattgtcttctgtagaacacactattgaattatgctgagttaaccactttagagcctgacagcttttaacagagaacagacacaagcaatctagaactggtgaaacctgaagggctccacaggggcaaacacaaaactcatccataggaagtttccacagctcagagcagtaagaattaattaacgtccttgttttcagaaaagctatcgaaaagagaggtagaacacctattctctgtttcaatttctaaatttcttatatgtaggcaacatcgtttcttcttttttggaaaaaaataactattactttgattcatattttggtacttccatgtcaattggaactactcatagctatcttccatgtttttctaacttctcctgtattttccatctttttatctcattggattacattctgagtgctttctttatgtagtcagcttatctagtcctttaattcatctcttgaggttttttaaaaattttataaaacattttctttttaataaatatattttatttctagaatttatatttggttcctttatttaaaaaatgcttttttttagtgtgcccttgttttctcataaactttattcactccattatcattgatcattcttacacttatttttaagtcttttaaagataattatactaccagtaatttaatttatctaatagaattcttccatttgttgcattaactaacttccttaagcagggagtctctgctattactttataattttggtctatgagctcatcttcagagagttgtctcacacctgtatgctgattattccatgaactgtggaaattccttttggagtagttctccattttcttttgtggagctctatacatttcaccagttccagacaatttttaccttagacttgtgttcgtgcactgcttggattatgattaagatcccatgagtagctcagatttagactttcaatttctgcaagagtctctccacccatggcccagggaagatcatctctttccattccatatccccatgctatatcccaggactgtctctgaaccagattttctagctcccttcatgaatgggacagactatttccagatatatacctcaagtgtacaaagaacttttgacctacgatttagacatgtagactctcatttttgtggatttttttttaacaattaagaaatgctttgtaagtaaaactgacacaaggtcataattttatcaaaatcactacatgtgattactgaatgggcaacacatagctcagtatcacttactttgatgccaaaatgtgaggaagaggggcttggttgccctccttgatcaagagtaaaagtccttaaattttctagctaaaaagactcaaaagacttttcagacttggatattagggacattgtgcttcctttcaaaatccattatgggactatcacccatgagtttgtctaaatcattctgtacctctttatatattaaaacagtttcttgcctttggtatgaatagtatgattttcttattcactgcattaaacagtattagtctttacatttacataaaagtaaattttgaagaacaatattttggggaggaaattctttttcttgttttttattattttattttcctgcctttcactctgattgtaagataattattagttttggaggatttcttttagaatatcattttatgtgccattttaatagaggtagcagagcataggtattaagattcaattcccagttctggagtcagactgcctgggtttgaattcagccaattactactgattgtgtgacgtggggaagatttttaacctctgtgtacctcagtttccatatctgaacaataaggatgatgatgttattaatagtgcctaccacataagtttataaaaagggctaaataagttattacacataacgcatttagaatagttccccatacatgttacatattattatatttcaaattttcatgaggtctttttgcacagacatctccataacctagcccaatgatttcatgaattttgggaaattttcaaggcatgtggaaagaaacaatcctatgctatcaacttttatgatctcttgctttttcatgaatgggtgctttgaaaattatgaatccaaataacccttccttttttcaatcaatactttcattgagactatttataggaaatctctcgggaatggagggagttgaggtaacataagaacctttcagctttgtggccagagtgtgccttcatacctccctgctggtcctatgggccaagataaacatgcctggcaaggaatgccttgcttactccaccctgtcaactaggaggtaaaggttttggactgtggtattgctactccacccaacttctgttccatttttaatatacctttgagataaagtgtattgtctccttttttaaaaaaaaaaaagccttgaaggtgtggctgacaagaaggaaagcaataccctgccactggctcacacatgaaaagtcttccagccccagatcatgacttgactctctattctggctatgcagctcaggctctacattttgttcggtaaaagcaacaacactcacatacctcaccacctggaaaaaatgctagaaattgtccctggcaaacacccaggaatgtaattgagctcacaatggccagcacagaaagaattgctttcctcaacaactgtgttgctgaaagtctgcatgaaaatcaaatgtttgaagttggatcatttcttaagtgcattgggaatttgctacttaatgaatgctacagagacttatttattgaataatgataaagtaatagtgatcctttttatctatttttcacatttagaattttgaaatctagttttctttaaagcaagacacacccatagcattagtttctccactacatgtgtcatctaagctttgggtgctcagttttctttcggggaatactaggggatgagattcaatgacctctgcagttccttccaacttgaaattcactatgtctaactaaggcagtctaggaataactagagataagccctctggtttggttatttctgattttctcatttcatccataatctgagaaactgtgtgcttctagcattagtttctcacatagctccatgtgaagcttcacagttgggctggcatgactgtcttggtgggtatgacacagaaagctagagccatagtaaactgatattttgaagctccctcagagatctctttcaatggctatctttccttccttatttttggccatgagaaaaattattatagaagattaggagtgcctctaacaattttataagttaggaccttctttctggatgttttctgaggcataaagcactttatacaatattttgttatttgttatgagcgccagtgatgcaataaagggaaaaccatattggctctacttcatctactggaaaagtgcactataagttaatttggttacttgccaaaatcatccagcagattgctaatgaagccaaagatactcaattttgtgacagaattactaagctacactgcttgaagttaaaatgtctgacaccaggtattttttagtttgtaactttccttactatctccactgaacatcatcctcttcatccagggagctcacacgttcaccaactcacccttgaagtcatctcaagaacaaaagacaactgaaaggtaatatttcaaatattaattagatatttgcggtgtgcctcagttcacccaacccataagcctttaaacacaaatgtaagtagaattttgaccccctctaaggctgaataaatactcacacattagtgtgagcatttgaagtcatagagataaaaaagagtgtgtgattcatgtcagcattatttcatctcttcaatgacataaataaatgtgataatctatgtgaaatgtcttggcgaacttaaaagaatgaataatcatatctggtgttatcattgcatacaggaataatattaatagcattgtaaactatcatctgacattaaaaagaccattaagctatattataaaacactttataccagtaaatatgacaatttatgtgaaattattaccaaactacacagaaaggaatggaaaatataaatagtcctatattacttttaaaaaactaaatcatttttgtaaaccttcttacaaagaaaactccacatccaggtagcttcgccagtgaatttgaagatgaaataacaccaatttcacacaacattcccaaagaataataaaaagtgataataggtattttcctcttatttattagcacagcataatcttgatcccaaaacctggcaagaacattacaagaaaggaaaatagcagatacatggttgcaaaatgatcaagtaggcttttttccaggactagaagaatggtttaggattcaaaaatcaatcaatgtaatttaccacattaataaaaaagaaaatcacaaaataaattcaatagattcagaaaaggggtttgataacatttaatacacattcatgacaaaaagtgcctagcaaaccaagaagacttccttgacatgacaaagtgaatacaaaatttctgtgcaaacattatagttaattataacttttggaagaagacaagaatgcccactatcaccactgttattcaaattatgctagaggtcctattgtgtgtattaaggtaagaaagagaaataagaggcataaggaattggaattggaaaggaaaaatataattttcattatttattgttagaattaataactgcatttatctagcccattggatataatatcaatattcaaaaatccattaacttctctatataaggaataaacaaatagaaaaatgaaactttttgaaagataccatttacagtagcaattaaaacatcaattttatgctgggtgcagtggcttacacctgtaatgccaccactttgggaggccaaggcaggtggatcacttaagcccaagagtttgagacaagcctaggcaacatggcaaaaccctgtctgtacaaaaagaaaaagagagagagagagagagagggagaaagaaattatatatatgtaacctatatatataattatatataaacacatcaattacatatatatatataagcacatcaattttagcaggtgtaagcaaaggaatttaaagaatgaacatcaagaaatgactgttttaagagttacaatttgatgtgacaggtgcttgaaaatacaaccaaaatcaatacataaatataactcatttttaataatccagtgtccaaatctttcttattcttgctctcatctgttagcttctagatttctcaaatgcaaaatatcacagctatttgaaaattcaccagtcattacctaacaccagataacaggaatggccttcaggaaactttccacagaagccttggttttaaattgattttatttacagggagagtgaaaaataaggataaattaatacacaatagtccaaagtctcttaaaggcataatcttacatgaaatcagatagcttcttaatgcagaacatcttatagtatgtcacatgaaaatatacaaagtgtttacggaagcaattttgaactaatagagaatttctgaatactacgtcaggcaaggtggaaagtactcaaataatgtgtgaatttatgatgaatttgctagacttcagggccaacttgaaatcctctttttactcctccagacgtttccatacagttcctcgctcagaacagcttcagctgtctatgggaaggcttcacaagacaaagagctaggacttggccatttacacaaaaccaaaagtgaattacccagagtgtgctggcagagagacttgaatgtaaggacatgggaaaatctacacaggttgccaatggtttgtgactgtgagaaaagaaaagaaaaattaaagaaaatcttactagcataattcacattggacaacatgagcacattccagtcaatccactttatagacatgatctcactggtctccccaacatccctacaaggaaatgagggggaccagtatggctccacccttaggtcaaaagcccatccttcactcccacttgtggctgtgagtgggtggaacacatttaaacaggggaacaaattaccatcttccttgcttttgaccctttaacatgcgggtgagcaagtctgccttttccctgcttgaggccatacaattcccaaaacaacttgtctgaaatgttgggggctgagtcattggccagtgatagttttcaaacaactgctggtttgtttctcaaccactgcttggccatgctgacttggacacaatacagcatgtaataaaagtgcctgggatattttcctccttggcccagagaagacttttagaaggaaagacaatggtgaatacggaaggggagatgaatgcactagaaagatatgttgccagcattgtgctcagccgaagagaagctttgagaccaagaaatgtgagcatattgggcatctagaagttctcccagatagtagcgtagatctccatttttctgggttgtttgttgttgttgtttgttgttgtcattttctgcactatgctgcctctcaagactcccttatgtgtgctataaaaaaaaatccatgacagaatggtctattctccacaaaaatagttactattgttgttgaggtgttactaatagttactagtagttacaaaaatagttactaatgttgttgaggtgaagtcaatgggaaagatagtagtaaaatagcaaaaatgtattagatagtatttttcacattgggaatataagacaattcattcaaaaaccaactccttaggattcattttattatcttacacttaaaaatatgtttagatttttctttcttgcactagaaattaaattgtcctatatattgagggatgaaaagcacagatgattatccgtataaatattgacacacatactcactctatccacatagctatctgttatggataaagaactcggcaacttctagcagtcatctgagatgagcaccatatgtgcattatttcactaaagctttcagagcttgagaaaaatagcctgaagaataagattgtttctttctgagccaaggttgcaatcttccaagtccaagatgtgcttgaaaatactcattaggtaattgtcaaagcctaggaagaccagtttaagaatatgaaataatattactactgacttctctttttgtgttcaatccagatggaagctggacacatgagaagtgacgtttgtataatagcaaagaaaagaacagagaacaagaaagcaaaacccttcacacctatgttctctttataggatctcattactgtttgctctctataatccccagaaaatagaaaaagtatatctatccaataagttgtggaaagtctccctctgtccttctataatagagtttccagtcattgttagacaactgcatttcattcaccaatagtggcctattgaaatcatcaacaggagaaacagttgttaatatcaaataaagagtcttgcaatggaagtcaaaatactttactctttcactaacttggtgtatgatcttgagcaagtcatttaacctctctaagtttgcttgcctcatctgtcaaacaagagagatgagataaattatctccacaggcattttcagaactattctagtctttttggaaattggtttatatttgtagaaaaggttcaatctgtttctggcatggcagtgaccaagtcagaatttctatttgggagatgagaaaaacacattaacaagattaattactgtagctgaaagatacataaatatggattggggtgtatttttaataccacaaaaacttccattcctgagttacttcattagcaactgttacttcaaccatctaggttgaggttttccagtaattctaggtcagcaattatggaccctacttattttcttttttttattatactttaagttctagggtacatgtgcacaatgtgcaggtctgttacatatgtatacatgtgccatgttggtgtgctgcacccattaactcatcatttacattaggtatatctcctaatgctatccctcccacctcccccaaccccatgacaggccccggtgtgtgacgttccccttcctgtgtccaagtgttctcattgttcaattcccacctatgagtgagaacaggcggtgtttggttttctgtctttgcgatagtttgctcagaatgatggtttccagcttcatctatgtccctacaaaggacatgaactcattcttttttatggctgcatagtattccatggtgtatatgtgccacattttcttaatccagtctaccattgatggacatttgggttggttccaagtctttgctattgtgaatagtgccgcaataaacatacatgtgcatgtgtcttcatagcagcatgatttataatcctttgggtatatacccagtaatgggatggctgggtcaaatggtatttctagttctagatccttgaggaatcgccacactgtcttccacaatggttgagctagtttacagtcccaccaacagtgtaaaagtattcctatttctccacatcctctccagcacctgttgtttcctgactttttaatgattgccattctaactggtgtgagatggtatctcattgtggttttgatttgcatttctgtatactataaggctccagtaaccaaaacagcatggtactggtaccaaaacagagatatagaccaatggaacagaacagagccctcagaaataataccacacatctacaaccatctgatctctgacaaaccttacagaaacaagaaatggagaaaggatttcctatttaataaatgatgctagaaaaactggctagccatatgtagaaagctgaaactggatcccttccttacaccttatacaaaaattaattcaagatggattgaagacttaaatgttagacctaaaaccctaaaaaccctagaagaaaacctaggcaatactattcaggacataggcatgggcaaggacttcatgactaaaacaccaaaagcaatggcaacaaaagccaaaattgacaaatgagatctaattaaactaaagagcttctgcacagcaaaataaactaccatcagagtgaacaggcaacctacagaatgggagaaaatttttacaatctatccatctgacaaagggctaatatccagaatctgcaaagaacttaaacaaatttacaagaaaaaaaatcaaacaaccccatcaaaaagtgggcgaaggatatgaacagacacttctcaaaagcagaccttacttatttgctgagaaaaatctcttgtattttccatccgtaaaattttcacaccagtggccttgttccatagggtccaaaggagactgaaagattggagggaggaattaaaaaaaagatttatgaagaaagtttaaaggaggtagaaagagtttgagtggggagtgtatttagtctagaaacaaaaactatgaagtgtggcttaataaaagtcatcaagaatatgaaagaccagctgctctctatttcctcaaagactaaaacacaagaagactgctttcaattacaacagcaggtggtgctttgggttagacccaaattattttctggttgggtacccgaaacaagtcactaagggagattttcaccactttaagactaagacagatatgaggctaatattagctcatgtgtatgaagggcttctatactgaggcttgtgctaagtatattacattggttatcatctttcattcacaacagccctgtaaaaaaagtgttaccactattctcattttggagatgagaagactaagagtcaccatatggctagcaagcagcagagtgtgatatgcaaccagggtgttggactccagagccagctctcttcaccatgaggctctgctgccctgagtctcacataattagctgcagttttctttggaataagaaagggaaactattgaatttaactttcaaatctaggaaggccttttatacaaatccgaagttctccatctctaccaactgtgaaataactagaagtgccggccgggttcggtgggtcatgcctgtaatcccagcactttcggaggccaaggcgggaggatgacttgagggcaggagttcaagaccagcttgggcaacatggtgaaaccttgtctctactaaaaaacaaaaagaattagctgggcctggcggtgcacgcctgtaatcccagctactcgggagtctgagatggcagaatggcttgagccctgggtggtcaaggctgcagtgagccaagattgtgccactgcactccagcctggatgacagagcaaggccctgtctcaataataataataatgataataattagaagtgtcttaagcatgcttttgtcacagtattataatcacctgctcactaacaaggacatgaaacatgttacatcatgattctgtattataaatattttaaatccttataaggttggggtacttctggtctgacttttatgttcagaattaagtaaaaggaatgtgaaattaaaaaaaaaaaaaagaagtgccttaagtggtttagagttgtagaaagatcatagaacatataagctctcaccagctttgtgacctcaggcatctccgttaagctctccaatgctcaatttcctctcttacctattgaacagtatctgttgagcatgtacactctcacatcagaaattcaatggtaaataaaatctgaaaaatcagaaaaataataacaaccacacagcattgttgtgtttagcactcagtggagcacgagctccctccccactttaccttctgaataagggatttgggttgcagaggaaagaactcgctgacattaagtgtgaaatatgccacgaagtgtagaaaaaatagaatagagaatcattatcttctgtatgaactttttgaaagtccagagagaaaaatcaccagtagggtcattgtttgctttctcctttgtatgttcagaattaaataacatgtatgtgaaattttttaaaaagaagtgtcttaagtggtttggagttgtagaattctcatagaattttttcatagttttattatagtacttatcatattttaattatttttacatgcctttctcccccataagactctatattctacaagtcaaagtctgtcctttgctcctttccatatttaccaaaattttacccagccagggcttggcacataatagctaccaataaaatatctgttaaagaatgattgaataaaaaataaataaatgaaagttctcagctggaaaagaaggaaaagaaaatcacaggagataatatataaactggaacttatttcacaaactaagacgtatttcattgaaaataagacttttcattgaaaatggaaataagtttttgtttcatttagatgtagaaagacctataattaggcacaatgtgtaagcatccctcatgattgtttaaaacttcagaactctctttttggcagctcttgagggacacgataaattttagggttttttttttcaaaggagtgggttgtccttctgggaagcaggtggataggaccacaagatttcttccagcctgagcttcagtgactcagtaattctaaatgaaccctcaggaatcctctcaatcaaatgattctttccagttaccctgactgtgccacaaacaagctcacattgaaagaaaagcccaaatatttaacccaatattgtcatattgcaaacattctgtttttacctaagtgcatgctttcagcccaacagaagtgctgtgactggactttgtctctataagaccaaaacaataagctaaaaaaaaaccaacatttcatgaaattaggttttggggccaaaaactgagatgaagttttagtttgtttgtttgttttgttcagttttagtgaattgactatgtacactgttcagagcggtcaagcaggtccaggttctgattcttggacactacttcagtgctcagtgctctcgggtctgaaatcccatgatgttctggacttgtttaggcctgtcatgtagcaggtgatggaaggccaccatgccaccgaatcaaatttagagcatgaatttacaagaagggctctcttctcaaatttagtcactgtgtaatgagctcctcctgggtgcctagtactgtactggacattttatatatattctctatatccctaaaaacaatcttgtaaggcaagggtcattatttctattttaaatgtgtaaaattggacaaatttcctaaggctatctgtctagctaccaagttagagtcaggattcagactcaaatgtatctctctgcctgccttcctaaagcaggagggttggggtactggcatcatttattggcatttggtcctgaaagctgtaaaaagatagaacagtatacataaggcatattgaatgagcaattgttaatctttattaagagtttatcactcaattcaacccagttgttcatctttttcctgctgaaatggacagtagtcagatctcaataacccgtttcccattgctatttgtgaattgtcagtatttattttaatgatggaatcatttcttaaggtagagttgtatgtttactttataatgtctgaatttggctccttgtagagtaattttctgaacgggaattgtgcttccattacctaattgcaaaaagttgccaaaatttaaaaaggcactgggaagaagaggcggtacaagaattcaagtggatctcaaggtctcactcttaaaagaaatggaaatatttttggactggattagcatgactgaattatcatcctatttgctggcgtaattgcagttgggaggggagaatgaaaggcattgcttttctacccacttcctccagtgatacttaaaactgaactatgctattcataaagtaaatctttctgagtagtttgcagattttaccgtctttaaaaatgttaatataccattttagtacctcattctgaggaataaatttattcttaatataataaaaactcagaaaaaaatgacatcaaccaactaaaatgaaagctcagactctaagaaaacaaatgcagatgatgcaaaatacagcattggaagctaatggaaaggaatacttcttaacactgtcttaccatcatcaaaagcaatgagaaggaataagaatttacatgcttttggtatgccccaaatcttaatatcttccaaatgccatacatttcaggcttctacttttaattttctatgtagaatcatgaaataatattattagtcacattatactggatagtaaagttaatatattatttctatccttgctaatcttatgtcttttttagtttctgcatgatcttagaaatttgccaaacataaacgtgtcaacgtgaagttaagaagtgagactcacccgtccctgcacagtctatactatgccctttcgcaataggtattttttctaccttttctctctgtctcatgttatggaattgtagagtctttttattaattctcctatgttggttttccatttagaattcttcttctgatacctttccacatagtgtaaatgattttgttttcaatccatacatacagaactttcctctggatactaaaagcctatggccaaatcatgttgattttatttatttaagtctacaatatggtaataaatagagtaagttcttaataagagtgctagtttatttaccatggcagttctctgtgattaaataaatatgaatataatagtcagactactttacccatgtgaggcacatagcaagggagttggcaacatttttaaccatatgagaggttttatttttatctttgttgttttcaatattacataaaatacttttggctctaataaatcttaatattatctccctcatcaagtagtaggacaaaatctcctagaggtagctagttttgaaaaatccacacaaaaccaaaatcattgtaatcaattgtaaccaagcatcaactcacttcatcagaactaatcacatagccctaaataagtcctaaaatttcccagacaatgcacagtaaatttaaacaacatgtcgcatcctcaaaataataatagaaccattttttaccattagttacattttttaccaaagacctgcagacatcttttaatataatttactacaatacactatgtaatactaatgatacatttcattcaatttagtataaaccttgttaacaatgtatgaaaacaaagaaaagagaacaataaagtagctaatcatttattacactccaagttgctttatttaatagatttcagagagagtaaatttagagaaagattgaattcacaaaggaggaaagaccctggggagagggtcttatgaaaaccagaagtcaaagaaatgccttccttatcctatcctaagaagaacagtgaagattcagtaggaggtctctcaaggcccagaggcaaaggaatacagtcttcagagcaagagaacattaggagcaagtggactggaccacacagtgggcactcctgctataagtgctcagtgtgatcatcacaatgactttagctgagctctataactgctcatctcttattactttttttcttttttaagacagggcctcactctgtcacccagtggcgtgatcacagctcactgtggcctcagcctccctagccttaggtgatcctcccatctcagcctcccaagtaggtgggactacaggcacatgccaccatgcctggctaatttttgtttgtttgtttttggggggggttctgtttgtttgtttttgagacagagtctcactcttgctgcccaggctgcagagcaatgacacgatcttggctcactgcaacccctgcctccctcccaaagtgctgggattacaggcatgagccattacacccagccaatttttttgttttttatagagtagggagtttcgctatgttgcccaggctggtcttgaactcctgcactcaagcgatcctcctgccttagtctcccaaagtgctgggattacaggcaggagccacggcatccggcctgtaactgtccatctctgaaaatccaaaggcaatgtggagccacctagcggcagaccaaccaatggtttccaggtcaaagaattaaaattcaagtctttcctcaactacttattgcctttttgacattagacaagtcactgaaactcttttagcccatatttcctaatctgcaaaatattgataataacagtgtttgtgctaaggattgtatgataatggaggcaaaatgcactttgtgtgctgttaggcatcatgcaaatgttacttatccttatctgttcacgtgtgtgtgtgtgtaaaactttcacatgtcacaaatggagaggagtagatgagagaattgcactccatgcgatgaggttgagagtggggagctatgcctgggcaggaagctgcggatgtgcacaccagagcacctaggaatatatacactaggtgctggcagtagaagactctgctgtgctcttaatatcatccaattgcttgcacacgtagctgatacagaccagggaaaactgacaccatctttattcagggttcaaactgaaaagcagcatttcactgaggatttggtgagaaatgtattatactaataacattataataacaaccagcttaacatagttgtaaaaattaatgaaaccatttaagcaagagcataataaatgtttatcattttggcaattttgcaaatagttgttcagctactgtcacaatagttccttgtactctgcatcttccaacatacttgatggattattatccccataaagtgcccgtaaaagaaagcagcacaagagagttggcttatttaggattctatcaaccagctgttacatccaccagcacttcacccgtatgatcatcaatattcatgcaaaatcccaaaatgcctcccaaacattggaataaaatgttccaaatagctataggtttagctgtgttttgtgttttaatacagtgaaaatatgaaatctatttatgttatatgtggaaacacatatctgctctcaaattatgccaaatgataatgtatttcttgcttactgttgtaacaaaccaccacaaatttagtgtcatcgaacaacacaaatttagtatcttaccattctggagatcagaaatccacaaaagttttacagagctaaaaccaaggtgtcaatagggctgcattccttctggtggctcctggggcaaatgtttccttgtctttccagcttctgaagctgcctgcatttcttatcttgtggactcttcttccaacttcagagcgcatcgttccaacctctgctttcggcagcacatcttcctttctgacttttaccctccctctataagaaccctggtgatcagattgggcccacccaagcaatccaggatagtcaccccatctcaggatctcaagatccttaacttaatacacctgcaaagtcccctttgccatggaaaacaatatattcatagattctggggattgagacatgaacattttgggaggttcattattcagcataccacggctagtttactgtattattattacttcatctctgaaggaaaataatgcattggcagcattaaaaattttgttcaaatatgcccagtgagcccgtgtgattgagctccgtcatcatcatgttcaattcttcctgcctaagtcagtccaactcaggatttctcaccctcagcactattgaaatttggaccagatatttctttgctgtaggaggctgacctgtgcattgtgagagttttagaaacatccctggacttttactagatgcccatagacattctcccctccccagctgtgacaatcaaaagtgtctccacacatagccaaatgtcccatagatggacaaaaatcaccctcagtagagaaccactattctacacagaaagcagccaaattattgtaatggcccctttaaggcaataactcttagaaagcaaaagatccagcgatattaattaatgactaatttaaaagggcaagtgtaagtcatttatctcagcatttttggctaaatttactactaattttatttgtccaaggaagtcagagttgagttttattcactgacactaactcatctacatggcctgttcgagtgtagggttacatatgaggcatttaattacttggatatcagactaagagtagaaacttagtatgcaacatctccaaaagctgtgagcccttagtggcaggaatcaagtcatactgtctttgtttccacagaccataatctcctcaatcttaacccagcattatttccattatactgtgattgttctcaggcacagaggtgatagcatctctaaaaagatacagaccaggccctggaacccatttcttggttaatcccctaggcattaattcccaagctttagtcatttgtacacttcttttcataatttttgccattatttatttggaatttatctttaaattgacttacttttttaaacatagatactactttagcaatatgtaattcttctacaacacattaaattaaatatatggctataaattatttaacattcatccatgtgccatttaaaagtttctcaatattagatgcacatatgatactttgaaaaacacagacctggatgcaaccaacatcagcaaagcctgaatttttaactttgaactctaaaaatgtcttcccatctattcaacttcctcacagacgagagaacagcaaaggacagtgaaccaaactgctcatggagaaatgctgaaagcggtcacacccagaaagacaaactcgggctactgtttacacactttacctaaaaatcttcctttttatttttctttaaaatatgacagttaaaatgcatgcccttaaaaaacagcatttccaaacaatttgtactgacacattccacataagacatcagcccgataactatagacaaagcaaactgagaaattagcatttcccaaagtgtatgccactgtttgttagttctacaggatcttaataggcattacatgaggaagagtgggtggagaatggggtaagatctgtggtcaaataggattaggaaatgttattaaacaaagttaaaatgacattataaaacttctgatactttaatattcttctgtgctttgtgaaacttaaaggaaaatatatattaatcagtcagtcctaaatttatgtgataaaaaacatttttttctctaagagcatttcatgagactaatgtcctaaggaatgtattttgggaaatcctgatctatctagattagaaaaaattttattttcctcagatgaaggtgggaacaaattctagggtaatggatattttaaaatgcattctaccttagtttttaaagtccctagaggtacaggctctcttttcttgattaactttgttaatcactgccttgcacccccagggactcaaaaaatattattggatgtggatgatgaacatgaaagacaatgtggcagttattttactggtggtagcatggtttgtattggctacccctttgctttgagaagtaattaactttcattttatcttaactcataatgttccacagaatgtgggccctagtcatctaaaaacaatctttgttgtagctgatatcacctgaggagcatgaatggacagctgttaaaattcacggaattagcaaacaggatattttccctggaggactctgacttcctctctgtgcacaatgcacaaacctgcaaggggaattctagatggagattaaagccatgaaattagttaatgcaacaaatctaattttcctaacaaccacagttgacccctgaacaatgtggatttgaattgcaagggtctgcttacacatgaatttttttcaaccaagcacagcttgaaaattcagtattcacaggataccaaaaggctgacttttcctgtatgcaagttctgcagggctgatggcgggcttgagcatgcacgaatttctagaaccaatcccctgggtataccaagggatgactgtgttgcctatgtttgaggtgaaattgtgaaagtgaatgagataatgtggccaaaatactgagcccagaacgccttctaagacaggtgaaccacaaaatgtcatcctcaaatggcttttagcagcagaagccatatgagagatgtagcaagtgatattgtcatcaaactgatagtcatgataccatgaattcttatatagggtgtactacccaactgttgtgtgagcttgggtaaatcactttgcttttctaggatccagtttcacctatggaatgagaaagttggggaagaagtcatctagcgtcttgctactcaaagtgtggtccatggaccagcagcatcagcatcacctgggatcttcttggaagaaatgtagaaactcaggcctcaccccagaatctgcctttttataagacccccaggtgggccagtacacaggtttgctaactctcttcctggcccctcagaccactctctacctacctcactgccacccagccaccctcatggggcttcattctaagggaagaattagcagtgagctttttttttttttaaaaaaaaaaaaaaaaaagcctctagtaatccaagccctctctttcaacaggtaaggtaactgaggcccagagaggtaaagttgatttcctgaaaccaaacagctaattaggaacagaacccagattttgttattagttttccagtgtgctttattataacgtttcaagagaatggtaccaaagggataggatcaaattgccaagtgttaatgttacaacaaatgaataccaatgctttcttcttgcagaaaagcccttttttaagcctaaaaatgactactttttaatgaaatcacgttattcctggagatacttagagaagagttgagttacagggtacctcattcctcttccaggtggtagcaaagcctcaatacttgggccagatgtttactctcctctttcctctgtctctcaccaccaacccctactcacacacaccaaccacaaccaccaccaccaccaagtgtaattcaattatgaaaactggcagaaactacatacatccatggtacaagatgctcacaagcccagttttaatcaataactcctcagcaacctgcatttaccttgtctaaaacaactgaaaccttctgtagctcaaaaaaccaagtatgtctcaaacaaccacagaaaaatggatagtaggctgagaaaataatattatggccatatctaaactaatattgagtttaatggacatttgtatattccctggtaacaagtctcttttgccttggggcaatcttttcttttccattttgttcccactccttttttcattcttgtcactgacagtgaccaagaaaaaaggcaagttagtactatcaaaatcaggaagagtaacaaaaccatttgaatgaacaattgatcacactgcatttggccttagcaagtcaaatgtgttcttcaatttgcctcaagactattctaggttttgcctgggaaaaagtcctaggtactatacagtcatgagctatataaagacgttttggtcaaccacagaccgcatatattacagtagttccgtaagatcaccatagagctgaagtctgtagcctagtcaagttgtagccattgtaacatcataacacaacatattactcaggtgtttgtggcaaggctggtataaacaaacctactgcactgccagcggtataaaagtattgcacatggctggacgcgtggctcacgcctgtaatcccaacactttgggaggccaaggcaggcagatcatttgaggtcaggagttcaagacaaacctgaccaacatggtgaaaccttgtctctactcaaaatataaaaattagccaggcgtggtggcgtgtgtttgtaatcccagctacttgagaggcgcgtgtttgtaatcccagctactggagaggctgaggcaggagaatcgtttgaacctgggaggtggaggttgcagtgagccaggattgtgccatgcactccagcctgggcgacagagcgagactctgtctaaaaaaacaaaaataaaaacaaaagtatcgcacatgtaattatgtacagttcataaaatttgatgatggtaaatgactatgctattgcttatgtatttactataccatatttttatcattattttagagtgtactccttctaaatatatttaaaaaagttaactgtaaaacagcctcaggcaggttttccaaaagaaggcataggatatgacagttccatgtgtattactgtccctgaagttcttccagtgggacaagatgtgaagatgtgggtgtggagaacagtgatattgatgatcttgaccctgtgtaggcctaggccaatgtgtgtgtttgtgtttttaacaaaagaaaagtctaaaaagtaaaaagataaaagaatataaaaatagaaaaacgcttatagtataaggatacaaagaaagaaacatttttgtagtgctgtacaatgtttgttttaagctgttattttaaaagactcaaaacgttaaaaaattaaaaggaagaaatgttacaataagctaaggttaatttattattgaagaaaaataatgtttataaatttaatgaagccaaagtatacaatgtttataaagtctacaataatgtgcagtagtgtcctgggtgttcacattcactcaccactcactcactgactcacccagagcaacttcaagtcctacaggctccattcatgtaaagtgccctatacaggtatactatttttaaacttttataccgtatttttactgtagcttttctatgtttagatacacaaatagtactgtgttacaattgccaacagtattcagcacagaaacttgctgtacaagtttgtagcctaggagcaacaggctatacctatagcctaggtgtgtagtaggctctacgatctaggcttgtgtaagtacgctctatgatgttcacacagtgacaaaactgcctaatgacgcatttctcaaaacacatcactatcatgtgacagataattgtacttagaacaaagaaaaagtggctgggtgcagtggctcacacctgtaatcccagcactttgggagactgaggcaggcagatcatttgaggtcaggagttcgagaccagcctggccaacatgatgaaaccccatctctactaaaaatataaaaatcagctggtcatggtgcctgtagccccagttactcaggaggctgaagcaagagaatcacttgaacctgggaggcggaggttgcagagagccgagatcgcaccactccactccagtctgggcaacaaagtgagactccatctcaaaaaaaaaagaaaagaaaaaaagaactgcatggtgccatgtgcacgctttgaaaatgatctttttctcctccctcatagcatttaacatgatcatcacatcagagaattgtcaaactaaatgtgtcaaatcaaaagttaatttcagtgtttgttttatgcctgataaatctaaattatcaattatcttcctcattcttcaattctttgctacctgcaaatctttgtacctttgagggattctttgttcttaacctcttcatcttatataagattgcagggctttattgatagatcagcattcttcagtgtgacaagattaggtgatttacaaagtttagccaaataataaaaatgtctagcatgaaaggaagctaagaactgagcaaaatgcataccttcttggttctcaagaagttttttactactggcaggagtaaaagctgcagtaaactcttataaaagacagatgttagggaatataattaacatcctctgtgagcaaatattttcttttgtttagtaatagttaagagtactcatcttaaaccacaatccaaccaaataataaataaattttcctaccaagatcctataggagtactacttaatggaaatatgagagctacatatataattataaattatctagcagtcatatttaaaaagtaaaatgaaacaggttaatttcaataatatattttatttagccaatatttctcaaatattgtcatttcaacatgtaatcaaaataaaaattactcaagaggtattttacattagtcatagtagtccccacaaaacatgttaatcttaagaggttagaagaaaatggtaaatttaagagaaaagcataaatgatttttaaacaatttaaaagccatttttggtaataaaccagcatttaagtcttaagataattgaattgtcatggtctcttgttttttgtatcaaaaaattccaagagaaaactgaagaattttttcaccatcatgggtgagatttgcagttagtggtcaggtttctccataaaaaataaaaataattaaaaatcagaagaccagctggattggatgttctttcttctccttccctccctctttctcttactctctctctctctctccgtctttccctccttctcttttcctgcttttccggtcctctctccctcctacttttctttctatcatagcattgccacaatttttcatcattcatttatttgttgttttccttctttttaacatgtattgcacaaaatataggctctgtagagcaggaaccaaaggttttgttcctcgttatatctagaatacttgcccccaagcctggcacataagaatcactgaaaatttgttaaagaattaaaaaacaggctgggagtggtggctcacacctggaatcccagcaagctgggaggctgaggtgggcagatcactagaggtcaggagtttgagaccagcctggccaaaatagtgaaaccctgtctctactacaaatacaaaacttagccaggcatggtggcaggtgcctgtaatcccagctactcaggaggctgaggcaggagaattgcttgaagccgggaggcagaggttgcaatgagccaagattgcaccactgcactccggcctgggcgacagagtgaggctccacctcaaaaacaattaaaaaaacaaagtaaggagtatcagctaggtgagtataaaggtaaatcgttttttcattaaaaactctagaattctaaatattgtttatcctgacatctgatagactaaacagaaagagtgaagatatcaaaagtttcaacttctgtagcactttccattcctggatatttaagaacaacttatttcaaatattctcaagattagcaggatttagagcttctccaggtcctatcctcaagggcaggaaggatctgctaggggcccctaccaggagaagcctggaccgaagaggacaagtctgacagttgggatattttcacctagagcaaccaacagcggctaaggcagaaagagagcttgaaacagggccaaggagggaaaccaaagatggaagagcagattggagggaacatccctctgaggggacaggcagacagcacagcaccaaaggtgttggaggcctgtttgcatatggccagccactggtgggagattccatctaccagggctccagcaaagagagactgggcagccattcatcagtccccggggttacgcaattaatgcagcatcataacagaaacgaagaccaggcatgcccacaccagattctgactaccagagtttaaggttgtaaccgaagtttcagaaatagaggcattagtttgtaattcatgaaacagatttaggtataaccgattcagctctactttgtcatactttcaccaccaacctcttaaacccacttttttcttgagttttcacatttaacaaaaataacttgttgtaatttagtccatttgctataatccccaccggaaatatacacaaattttttttttttttttttttttttttttgagacggagtctcgctctgtcgcccaggctggagtgcagtggcgggatctcggctcactgcaagctccgcctcccgggttcacgccattctcctgcctcagcctcccgagtagctgggactacaggcgcccgccactacgcccggctaattttttgtatttttagtagagacggggtttcaccgttttagccgggatggtctcgatctcctgacctcgtgatccgcccgcctcggcctcccaaagtgctgggattacaggcgtgagccaccgcgcccggcacaaaatttaaaataacacaaagaacttgagtgtatatttcagctatcaaatgtttcctgttaactacaggagatattaaaggcgtagctgctacaaagaaagctttggaatgattagatctgctaataaactttataagtttatgactcagaattaaattagtcagattaggaagttaaaaggaaaacaaccaaattgtttaaaatgctggaattgcctaaagagatgggggaagctgagataaaagcatgttttagggagttaactgaaaatgctctggcactagaaaggtgacttgagactctttcagcacctaggagtgactctagcttgaaaaatacacaattctaacaatgaggactacaaattctcactgaccaaagatagttaaaagacatgagatactcaagattcagtgcacctgcttacatcttggaagaccaatttctttggaaaaatttgtggatacacattcgagcatttcttcttcacttcctaatttataacccagttcagaccaaattgtatttttcttctttttttaataatactttaagttctggggtatgtctgcacaatgtgcaggtttgttacataggtatacatgtgccatgttggtgtgctgcacccatcaactcgtcatttacatcaggtatttctcctaatgctatccctcccccaccccctcacccactgataggccccggtgtgtgatgttccctgccctgtgtctatgtgttctcattgttcaattcccacctatgagtgagaacatgtggtgtttggttttctgtccttttgatagtttgctgagaatgatggtttccagcttcatccatgtccctgcaaaggacaggaactcatcattttttatgactgcatagtattccatggtgtatatgtgccacattttcttaatccggtctatcattggtggacatttgggttgcttccaagtctttgctatagtgaatggtgccacaataaacatatgtgtgcatgtgtctttatagcagcatgatttataatcctttgggtatatacccagtaatgggatggctggatcaaatggtatttctagttctagatccttgaggaatcgccacactgtcttccacaatgtgtatttttcttcttactgatagcactagtgctacctggccagctcagaatacaaatatttatgtaagagaaatagcagaattgatgtcagagaaggatctagagtaagtgttcaagtcattcactgatttgaaaggaaattatgaaggatgccaaagtaacagaaagctggatctctgccctcaatttccttatgttctagttggagagagaaaatatacacaattagaagctaaaccactccattaaaaaagtaatacaatagtagcccccaggctccatcacagcacttgtcaccatctgaaattgctctgtgtatgtactgtatgtatatttcttatttatgacatgtctttcctattagaatgtatgctccataggagagactgagactgttgaatgacgaatgtcagtgttaacgttgaataaaatagatcacctgcagctgtatatcaaggtactcaaaagtgatgccaataacgtgagctctaagcattagaggaggagtacagtgaagttttatagtcaaggaatgctccatagaagcggggaagataagtcaaatttgaagaagtagagaaggaccaccaaaatgaaggaggatgtgaaaagcagaaacaagtgccactggtagaatagttataggctagctcctgggtttctccacgtgataaattcaaaactaaaacttcctctcaccacacccactgcatatgttcattaaaattccattctctccatcacatgtatccaaactctacagccacttccctactttgctactacccaacagccaagaattgtccaagttctagagactctactccagccatttctctctcatctgtatactctcctccactcacaccatcaacatttgaaccagccctcattaacatttactttaggttatctaaaagcaaacactgcacttgtaaatcacagcctgtctctgccttagtcttctcatctgtacagtgaggagcttagagggactaaatctgtccaccttcctcttcctgctctcacatcatagaattttatgatgtttctgtcctctgcagaacctagcactgcactttggacagacagatgatcaaaggttattttacatggatataattaacaccagataatactaagagaaattatctaagagcttcaactcaaagaccttttagagacatttctttcttaggctttattttactctctcaaatacatttgcactctgagcacagggctttctccattctaaccaaaaatatagttaattttccattctagggaaaaaaccgagctaaaactttttaatcacaaaattttaagaatcaagtaaattctccattctgaataaatattgacatcctctttctctctcccccgtcccacctcacatacacatacacatacacagacacagacacacacactcttacacaaacataccgtcttttttaacattttaagtacagatcaagcagtctagtgataattaatacagagtcctgctcataatgtgtgctgaaattcctgactgttgatgaaataattagatgaataaaaaacaagattagagagcagtgcctccccagtgctaatgtgcgcatgagtcatctagggatgtcacgaaaaggcagactccaatgcagtcggtctggactgagaccggagactctgcatttctaacccccaagtaatatagaaactgctgctctgagaaccaagatgctaacaacaaggtacgagggcacagggaagctcagagatcctggtggaaactcgctcatttttatagatgcagagcatgaaatagcgtgaaatgcacgtatacctatgtaacaaacctgcacgttctgcacgtgtatcctgttgctttttttatttttttagaagaaaaaaaaaaaagaactcgcgtgaaatggtgtgctccgggtttcacagctggtgctcacagaaaagggacaagcacagacagacaaacactccactgggagtcacaggctcaccctcccaccgcatagagacatgcaccctcacgctcttctggccccacttggtacgtgaagtcaccttttagatgagcagcaagtttctcaccaccttctactgtgagaggagagaagtcttcatgtatcatctttgttacttacttgtctcagtgggcttaacctccaaaccaccaaaactgagaatcagaaagaaaactcctaattctgccaaacccatttggctgccttttttccatttttaccacctttaccaaaatctcaagagaaaagatgactgtttttgaaatttcttaaatcagctgattatgaaatctgaaaggcccagacttagacatgctgtcactaccaaaacatggctgagtcatcctttaagttgtgttgtgtgcatgcatgtgtttgcatacatacacacaccctggccatgtgtatgctggacttttggaccacgttctggttactttctggaagttccgtctctacacgtgggctgcctgacttacacttggtaagttctagtagcttcccacgtataggctttctcactcttacccccgtagcttcgtgattttgcgtcaggctcctaaggtcagaaggtgttgtttacaacatgaaaagcaaaacaagaggaatatccagacaatagcatgaatttcttttcctctgataaggaccagaggtcactcacagctcactgagagagcatctaaaatcatagcaaggccccggctgaggcaactgggaaacacactcatttttagtttagtctattaagaaaaagatcagtcttgaattcatttggtttcaatttacttttcacaaaacacatatgtagtaaaagatcttgggtttgtgttttcctttctgcttgcaaatttcatcccatttaaaacatgaaaggagaaaaataatggtgctaactagagccaaacaaaatatgggtggtcacagtacaaactttcccttagaaagctttacccctacacataatgggtgagaattttccttactagagaaagagaggcatgtcctttggcagtggagtattttgttatcaatgagacacaacacatgcctgcagggatctgcattctcctccacttcttagaaccccagagtctgtaatacaaaaatggaaattagagtaagcagaggtttcattgagtgagaggtgttatcctcctaattttgtcctcttgaaagtagtttaattattttcttgaattgtggagtccttttccagtctgtttctgaatctctcagctatcaacttccaacttctggagttatataactctagaaatcattaattttagatctggaagatcatcctccatgcatgcctcactgaggccttttcagggaaatattaatatttcttaattggagacagggccaggacttctgattcacaatcccatgctcttttcacatagttataatatggaaaactatgtcaagtttacatgaaagaatgaaaaacttaattagaaagtactttgatattattgggacccattactctcctctaccctctcatatttttgttgttcagaaggagcctatgatgaagaatgaggtaatataagccactaactatgcatgaacctaagaagttgtctccttcgtaatgttatttaaaaggcaatagaaagacttctgctaactgtctcccagccctaccacacatcaacagcatccactcttagatattctgaatttcgggctaagcattaccctctctagtaccctgtcatgaaatttaaacattcctgagaaatgatacttaaagtcattaacaaacaactctgagtttgtctataagacacttctccccataatgggagaaatagagccttggtctgagtatcagaaagcccacaaaaaggagaaaagtgcagaaaagagagatgaagtatgccgaacttaacttgcatcacacttttgcttaagccaggtcttaaccattattgtcatgcaataaaatacaagtagcaaaattcacttagagtctagttgcctctagtaactgtagctaaggactgactagtgtccaaagagaacataaataaagataagttatcatttccaattaaatcaacatgtttttgactactagtattccaggggcaatacaggggagatttcaattcctgtgagtgatgatcaacatgatgacaatgacagctaatgtcaggtgtatcaggtactattctaagtacttttattcattcatttatcaattcattcatttatccaacacatgcttactcagtacctgctatgggtgaggcattgtttcagttgctgagccttcatgaagctcacattctagtaagcagtcagagttagcaagcaagcaagtatatgcagaatgtgtctgatggtgtaaagtgctgtggagaaaaatataggaagctgaagaaaacgtgttgttaggtggagttgcttttttatagacatggtcaaggaaggcttcagggtaagacctaaaggaaatgagggagtgagctataaggatttcaagacaagagaaaagcccatgcaaatattttgaatggggggcatgtttggtgtgtttgaagcaaggaagctggtgaggctggggcttagtaagcaagggggaagaatggcagaagctgaagtcaaagaggaatcctcaatatgcaggacctcataatgcatcagcaagaccttggttttcacactaatgaagataaggaactagtgagggtattgagcagaaaagtgatgtgatctgagtcatattttaagagaatcagtctggctgctctgtttagattagactccaaggaaacatatgcaggtgctgtattaactgatttacgtctcacaagctatgagatttgcgctgtttcccattttacagatgacaaaactgaaacggagaagtcacacagacggtgaattgcagagccaggagaacagccctggcagccggctctggaggtcatgctattaacctttacactctacccctcctgaagaaagatgttaaatgcagaggcaaggaaaattggtgcaaatatcattggaatgagatcactaggggttgtcctaatagggagaagaaacatcatttttcctcattctattgtcattatttcacagaccatgttgcactttgtagaaaataagtcagaaatacttgactgtgtcacattgttcaaaaggagaaagtctattacaaggcagcaatatcggagttattagtagaatttcatattgactttgtttcggttaccagaactgtcaactgcaatactggaagagggccttgcacatttctttgccaggcctgcccagcacaaagttaagaggcatgtggaaagagccaaagtttgctttcagtgatctctctgttgatattacccattcaagattttcaaccctcactcctagacaacctgtgtttctctaattatttaaaacttataaagaaattctccacagtggatatattttttactcacttctcatctatggttttttttaattcaatgccttgttgccaaaagttctaagagaaagttgtcattaaatgctttgaacactatcttaaaacaaaaagaagcataactaaattagcttctttcatgatgtgccagaattttagaacccttaaaattagatgtgtaatgttaataaaaagctgtactttttacacaattatgtaaaatgtttacatatataattaggtaaaatgtaactacagatacataaataattatgtactaaaaataatactttaagaatgatttttttctcgttcactttttttaaagattgtctaaaaattgaatgaatagaatgaatcccaacagataaccaagaaacaaattcagctcaaagagaatctatttagtgccttaacactttaaagggaaagcaaaagcggtactacacgtaggattttcctacactcaaagattttgcaaccttgtcagaaggacaaggcttatatctttttttttctgttttttttttattaaactttaagttttagggtacatgtgcacaacatgcaggtttgttacatatgtatacatgtgccatgttggtgtgaaggcttatatcttttatactgaaaagaaaaaattgcaaagatagtagttaatatcagggtcgaattacacagagcagcagcccctgctctttggagcagtcttggggtcagcttcctgccagcactggccggctgagtcctcactccatcctgctgtcaggtttggtccattctccaagccctgcagactctgaacaatctgggttactttgcattattacacttccaaagtaccaatctgagtcttataaagtgcatactttgtaagtcttacaaagtgcacctctaggagtgctgcaggcttttctttctttcacccacttggagagccactgataaagctggagttttaattgatttgagagaggagaggctgagccaggcaattttgaacatggatcccatgaacagggtggcagacctaggggaagttccctgcaggcagtgtagggcagcaggaagggactagatgtccagaagtttgggaaataatatattgcaaggcagaagaggagcccagcaagaaatgtacctttcaaatttgacaggtgtgactccgtacctcagaaatagatgacaactttctctacacctttttttcttctggcctatatgttgttctccttccagcccccgcaaaacaaagtaatggtagagttatttaattcaaaaacccagtttcccattcgaatccccaagtagttctgacgtacgtccaggttagtgaatcatgtagaagttaatttattcatttaacaaatttatggagcctctgttatgaattaagtaggcctctgagggccagcctaatgtccaacttccaccatttctataggcaatctatgttctgagcttctaactactgatttatgccattgggaactcgtcccagtggcaaatagaaaggttatttgtattctttctctattagaatttacatgctgccttcaccttaatgtaaagagagcactggaatccagaagaagggacagcagaccccttgattttatttatttctctccctttctttgtacttgaattatttgcatgctaagaaagcctcatggtacaatttttctaaaggttccaagagaggtatctatcataatactggttgataaaagtctaatacatgacagatcaatttatataacagtcagcacaaaaagacaatgattcatgttcctaaaatgagaagatctcaaaagttcactgatttataagaagcagggagactttgctcttgttttggggatgaataaactcctgcccccccggtatgatattttttgggggagtcataatgaacacaataaaagataaataattattttattaatttaattcatccaagtttaacattttcccagcatagaacaaatatgatgataaataagtaataatacctacttttaaatgtcaatttttttcttagcatacattacatttttgtatctttctattctacactttcataaatatcttaggtatttttagaaaaagatccaagtcgtatggtccttaattataactacagtgaactgagtgacaggtaaataaattactgttaggtcaggaaaaatatgtagcctgtatacacactttggaaaaggagagggcaacatcgtctcaccttctgtacaacctcaccctactccactatacaccccacaaaaaagaccacacaggtttgtgtttgtgcctgccctcctcagtactggaaaaatagtgatagtgtgaacttttgacagtaggaatggatgttaatctctggttcaggtcttctattttcctaacataatcttatttttaaaagcagaggaaattttctcaatgaaaaccagctttgttcccagagtggtttttttctattatttattccttacctagaacccagctcaggagaactggatgttcagtcattttctgaaacagaaggtgctaaccatatctgaggcagtcattctcctaagaaaaaatagagaaacattgccaaaccctaaaaagagttccagcactagaattccaaaactttaaacatgttttcagactgacaaccttgtgttgttaccaaatgccctttatctttgatcataataaacagttctgactccttggctggttaggactggttaagtccagagtttgtcggctgccttcaccataaaacttaaatgacatcaattcagtcatcttgatgtgcatgttttcatatcatttctaaataattaactcagctctgtcctttacagctctgcaatggtagattttagtaactacttaagaaaggtttataaactttactgttcatgaataatattaggttttcttgaaatcaccgcaaaagggacattctcatagagcacccgggaagagagctaaatgtaagtaaaggagctacaccaatctagtttgatgaacagtgccttggattgttttatatacatgttttcaaatgtttagctctccttgttctgaaaggatctggatcaacttacaatgatacaaataacatagtaagataaaatagatgaaaaataagtaaagaagatgagttaaattggaactaaggacagaaaagtgaaatgcagtatggtgaagaggataccctgaatatgtatgaagacatgctgttgtgagacggagttgtgaaacagaggccacaggtaaggccccggtctctctagcaggccctgtgataagggaaacatgttcaattatcaaaagacacacagtaaattaacccacttctcaccaccattgctgacacactaagagggtagagcttcactggtctgagaaaagatgcagtacagcactttctgagctgaataaccaggctctcaagccctcagagggcaccaggtgttggtttgaactcacatccaactaaagagctgtctgcttcatgttagtggtaaaaccaaggagcttcaaaccctcagttagctaactattgtcctccttgcttctgcctgtaactagccatcactcccgagggagtgcaggtgttcaactctccctgacaagcatggcaggtgtgtttaggaaaaggtcactgggctgtcccttgcgtcctcttgattttggtccctattcgctaggtaagagtttagggaagacagaggatctacatgattgggcccacgccctgccgaacttggggcacttccagagacaaaactgcagaaagtgccatctagtaacaaacacataaaataaataaaacaagtaagaaaagtaataagattaaaaacctgctagtctctgtccatgtatatatgtttaataaaataatagttaaccttaattgagcactatgtgcagatactgctctaagagccttacatttcattcaagtaatcccaccaataaccccatgagacagatagtgtttttattattattattatttattttttgcagaggcagggagaggttaggtgaccgcttcaaaatcacacagccactaagtgggacagttaggattttgacctaaaagtcttactccagagctcccctcttagctgtgaactccatccagcaccttctttgcctcatccttcacccttcaacaacacacattccagagactactgtgtctgatttcttttttctttggtttagcatgatttcccctccatttgaaaaaaattaagggaaaatcacagagtgtttatggtgctacccctacatcatcctcaaccacttctcaaagacgtcactgcttatgtggtgagcaggcatccaagggtgcatgcactgaattctgtcatagaactggaaactgaagaagatgccagatgcctcaagacagactgtggtcagagacataactcagggggagtgcctgtccctaattcctcatttctccttcattgttgggtctccattcctctttgctccacatcaaaagctaagacactcacttctctaacttggcccattggcttgccttgccagaaaatcaccagcttgaatcattctgatgataaaaccttccacccgaggctggagcccacttcctccgcccttctttgatctctgaagaatttttctttttcggaaaaaccatactggcaagcacaccaaactccttcacatacttgagattttacagtggctttcttggaaccctgttgtattttacatgttagttgatctctgctggatagggccccacaaggacctgttgacacctcacagcagaatttcacaaaatgttctagggagagataattttctaattataacaccaaattttgcttataaaggcattttccaaccacttcatttccagtagtgggaatagtctgagggtgaaattagacccggggtgcatacttttctttctttctatttttttctttcctttttggtattaggaagtatttcctggaaaactaggccttgctttccaaatgctcacctgagaatgcaaccctaaatgttaccttccttagactaacccctggaagcaacaacaccaaggctctgcccctggacaagcaggcttaacacccccacccccgccccgaccaaggaatgtagtctacccttctggccatcttggccctttttgctctttctgtctgcctagacatcttgtcctccaaccaccagttagaaacacaactacttctcatcctttcgacctttttcactctcaaggcagccttccctgacccactatatcagtgttccccaaatgtggcctgtggaccacccatatcagaattacccagggcctagggacctgaattttaacaaactcccatgaaattcatatacacatgaaagttggagaacgtctgctctatactgagttcagtctcacactccacccttccatagtccctgtctaaccctgcatcatactggtaatgacctttttaatgtctatcttctacatcagaacataaactctctcagtacagggacatagttgggttttcaaagcttggcagtctctggcttacagttggtgctcaataaatatttattgacccaaattacagcaaataaattttgcagagctattttttaaaagaaatcctgtgtttcaggaactaatctcactccactttttaaagaaggcaataaagcaatcaaaagatgtttctatgaggaatttaaccaaaaactagtacccacagaatgtcacatgcctctccatattgaatctgactccatatctatttggtttgacctgtgtgatcacatcaatgttgtgaatagcaacagaggcattatcagtgattaaaattaatttcttcccagaagatgagtgttatggtgtaatgttttttgaaatgtttttaagaacaaagcttaagatgcaaagaattttcctatcaagatacagctaaagagagatagtgacgcataaggaaattccttttaagagccaactcccttcttctcatgtgtgaggagaacctagctatcaggctatttattttgttggaggggacaggggaatctcagaattatacttgctatttaaatagccagtataaattttttaaaccatacactcattcaaatgccatttaactctgcatttcatcaagagtatgcatgcatgtatgtgtgcatgtgcacacacatttaacactaaaaaggctgtatcgctgaaataaaattctgagttatatgttaaactagaagaagatgacctggaaatcccagagcagagcagcaacactgtcatccatggaactgggatatttcccagacttttgcctgcgctactcaccaaatattctctttgccccacccacaaaggaaatggcatcatggggaggaacaggttgtgacacagcaaaaatcacagggcatagaaaataagcccactccactatctccgtcccctccaagcaccaataggaggatttaatacagaaaaataataaagttatgtatattttaaggaatgtcagttatgtccaaataaaagggacattgttaaactaagctaagttgccagtggcccataagcaaaattccaaataacatttaatgaaccaaagctgtggaaattcgagcataaagaaagaggtttttcacaaaccttccatgagtttaatccacttggtcagctactgtcaggaggagcagccagtctgttggctgtgaataataatgtttgtgccaggcacaggtgtgctaacatgtggaccaggcatgtgtgttattaatattattatcattattcctattttatagatgagacagggttagagacattaaatcactagcccacattcacacaaatggctaagtggtaaagttaacatccaaaatcagattatatgagtcccaggtcaatgctccctgcactattaagaatctggaaacttctgcttaaaatcataatatcttgaagaagtaggtaaatgtgaggtagaaaaaatatatactttattttcttgatggaagttctggctccactccagggccttacccaaaggtgatgaaatccaccattttggaactcttaatgggtaccaaaaggcaaatatgttctcaaactataaatggtggaggagagggtcttgaaaaaactatcactataggcaatttattgtgacaattccaagactattttctaaattatttttttcaattgcaaatcttcacagtggtcagtcctgcttttcacctcattacctcacatatgaaatcacttccttttctggtttagaagtaagaagacaatttgaaagcctcagacttgaagaaacaacaaacaagagaaagccccccaaaaggtgatcgttattcagtagttacataaaaagggaattgaactagagtctgaaaacacagggaaagtaagtcactaatagaaacaaatgtaatagtcaccatatgattaattgttttgttttcagccttctgaaaaccctttcttttctcttctcaaaacccattctcgcctttctttttcaaaactcctgggattcttttgcacatctgcaaaaccaatgtcagttccaggttcctattctggtgttgaaccaatctggcctccagccttggaaaacgaagccagttctcaccagacaaacaaatggaagtgacctaatacctgggggatgtgggagtggggcctcgactgataaatggcaaaggatttcaggcctatctggtcctcagaccattgacaaacagaatcacatcacggcttagcagcaaattgatgcaatcataggaaaaaggtgaattttactttgagagtagagagagagtatatgggatacagagaattataaggtcaaactaagtagttgtattctttttaacagaatgattttataaaaatagtcagcaacatagggataatattttctacctctctatcttcctaatgatgatttatgtctatcaaaccaaggctggtgggggaaaaaaagcattttgatgctatcagtaaatagaagtaatactcttggtttgtgactttctttccactaataaaaatacttgagcctttcagggttttgttgacctctattaaattcaggtaaacttggaagtgagcaaaacagaaaacctgtagttcttggaaagcaataaagtcatactttgaaattgaaaggttttaaaaggttagaagagaatgcatttggggccatttgtggcagaaaccaaaatcaggtgttattatcctcaccaacaaccatgaaaagaaacttagttatttgtgacggttcaagtggtactttctttgaggaaaaagattccaaacaattcctggaaactctacctctctaagaagatggcatttttgtgaattgaggataaaggcatcagcaacatatggagtacatttccctttataaaactgatttgtttaaaattgaggggaaaaccgcttggcaaggcatgttggccaagccaatggcaaaaagtcatttcagtttattgtgattcttttccatagtccacctcccagcctgtcggacatccgggctcatgatttataggccctgaattgaaaaccaaaggcagctgaggatgcctaacaaatatgactttctcttggcatatgaaacacaacatttccttttctgccccatatctgcagagatgatggcataaaaggaaacagctaaagattttccagaaacaaggtgaatttgaaaaagcctcagaagtggctgttttttgaaggattacttagtctaaggaagaaatcccagaactgagaattagacagacatggaagctttccaaaagtggagtgacttatcaccctggcttgcccaggtctctccttgttttattgctgaacgtcttgcatccctggaaacccctcagtttcaggcaaactgggaaaattgagccataaaggcaactgaagtctataacagacttgagatgcctttctttctctacatttctctttttctctacatttgagccagaaagtcgtctcaagtcttttatagactcaaaagtagagaaaggaaggttttcacaaagttgagaacagtttgtgcaatgtgagcaaggtggaaaagagtaacaaaaattctgataatagtagctaatattcatgtagtccttgatttgtgtcaggcctctgctgtgtgctttacaaacattatctcagttaatcctgattacagtcctgagagttacttcttcttattgtccccagtttacagataaggaggctgaggaacagagaaattcaagtaacttgcccaagttcacacaagtagtaaagataaagccagagttaatgtcatgaagtacattgaacttaaccaagaacaaccccttcaatcttccaccacttagtcttctcatgccccacgtgcagtctctttaaattttaagatggaattagaacaggacatagtcttatttttgctaccccaagaacttgctagatgccagatgctccctcaagcaacagattaagaaaaagagaaaccagtaaagctcacacttgttaaatggcaattggtttagcacctcctaaaacagaatccacgagcttctatggaataaagctacaaactcttacagcaaggttacttgaaacctgcatcagtaagacgttcagtgccttccctctaaagcattctttcaaccgttgatcctgggcattgggcaacctctggtgagctaagcaccttgccagacggctgtcatgagccctgtttaatccttctctcaaggagcagtggtattgtttcaataaagttgccactgtaattgcttggcttaccgtttaagagtattataagttctgggaatggatttgtgaaaaaaaaaatacaattaaaacaaattttaacagtgttctattgagtatgtagttgcacaagaggagccaacttgccccaggctggccactggaggatttatcttatagaagaagctgttttacttaatctggtttcctatataaaaacagaatgccaggagcctgtggctctgatgagaggggaggagaaaaagacattatggttgtatctccaggttaacacttaaaaatcaaggcaaatgaaaaacacaaccaacccgggagtttaaccatagatgcacttggatgacaaattcagacttccatgttttaaatgagagcccctgacatagctctccctggacgtgtctaaaaacacatgtatttatgattagtgggccagagtccaccaccacacaattgtggctgtaatgcaagtagctctatcttttttgtattcagaccatctgttttcaacttagtgctgtactggacttcctaaaacctgacctacctcaacgtcatgaccagagattacattctattttccccaagggtgccctccactatgaaagaaaagcataagcatttggacaggctggctggaaggcagcaatttctgaagcctatcccataaagttcccagattctcaaggaaacaagtgactcatggagctcttgatttaggtagctagtgcttccacagtgttaacagaagaatgatgaaatggaatctatctgagaaactgacctttgttctggggctattacaacttaaatatactctgcatcctactggccacctgtgagcagctccctttatgttcattgacaatagtcccagggacctgtttccatccatttatccatcattcatttatccatccattcttcattcattcaacaaatatttaagccatgatcttaggctctgggaataaagtaaagtacaaggcaggcaaaattccttatctaaaagtgctcacactctagtggaaagacagatattgaataagaaaacaaataaataaaatttttcagatgacgagtgccataaagaataaacagaggtgtgccatagagggagaaggaaccactttacatagggaaagcccctctgaggaaataacactttagctattttatttaggaataatttaaaaaattgaaagaataatattctaaaccaaaggcattgtaaatgcgaagtccttagggagcaataagcttggtgtgtttcgggaatagcaaggtctttgtggttgtaggaaaacaagcacagtatagtcaggttatgatggagttggagattcacataggacgtctagcctaagggaactttgtgtgtcattctaaaaccaccaaaatgtcattgaaagatttgagggaagagaggtgacatgatctgatgtataattgtaatgaatctatatggctgctgggtggagagtgagaggtcaggagggaggcaggatacaagagtggtcacaggaagaacatttaagagactgttgcagtaaacaaatgagaaatgatggtggcttggactattagtgaagacagtaagaggtgaatatattagggatttgttttaaagatagagctgacaggtcttacagaccgttcagatgtgagaaacaagggaaagaggagaatgaagaatgatttgaagtactgggcttttgcccttgggtaggttgtagtgctctttcctgagactggctccccatgaataaccctaatccagagaggtagaatgagttaactgttctccattttatccatgttgtcctgagaagcaggaggctctttatgtatcagaacttgtacctgtaatgacagttcccaacctcccaatccttttttctgcatttatctcagaacaagcaaaaatttgttggagccggagctacataagctgtcagcaaagaaagaataattttttttctagaatataaaaacatgagagaacaagcaaagacatggctttttattttgcagtcctcccctcgaaatgaatgattttattgcatcactcgcaagtgggaatactaaagtggggttggggtaaagtcttgaagtgtttactctctagaccattctgcaaagactagtggactcctggagatgactctgaacactctattggatttccctatttcatggagtctgtgacagagaattaaaaggtcttacgccttcactctgggctattatttctcagaatgcctttattacaataagtatattttacagtggtataacccttttcgtccaaaggtagaagaatttgcaatcagcaaactgattgctatgtgatacacatttgagtccaaattaaaacttggtgcaccacatctcagtttgccatactccatcatacacaagtgggtaattacagggccagaattaaccaggagagtacagagtaatagtcattttagtagaattatttactaaaacttgttgatgcatgaacataacgcaaaagattctcttgagcaatctaattctcacattggtggggtagcacttttttatctgaattcttacagcctatgaaacctcacccatcagaccagcatcttaaacatcgaggcagttgcactggaaaaaaatacttgtaagacaagcattccatcagaatgattagcaccaaaatgcaaattcattgactacctgaagataatacatagattcatttaataatattgacagtgaaatttttatatgcatgttctaaaatgtgctacaaaaaggaagcttattaaataataagaatttcaatcagcatagtctgtcaacaattccaaacaaaatcaaaacccagacagaaaacgtagtaggtgtccttcctgttacatcggatgactcatgatccccctcctcaaaagccctattagtgacacaagccacaattacagctaaccctcagcacttctttgcatgacacttgaactgaggaaaaaagtatttttctaaccctttggtgctgaatatttgaccctaaagcttgctgtttgctccttttttgtctcaatcctcatgactacaaatgctattattagtcataaggttgttcagtcccgtttaaattccagccatggcatttgactctctggcctaaacataatagggaactcaaaatcctaattatttccaaggggtctaattcttcagcattcactttgaattttcccagcttcatatggaatcaaggcctgtgttaaatgttagcaatgttatacctctgaattcttcactgagcatggagacaatgcttcctatcaaaaagtgcataagtttgtatatgggcagtcctggaaccgaatctcagtcttgccactgataagttaagtgaatttaagaaagtcgtaatatctctgttttgtgctatatatagaagataatatttatatgaggggttattatatgacatatattttatgtaaaattattggcacaaaataggcatttagtaaataacaaatattactcattatatcatcagcaacaccaccacaaatttatgtaaagtaactaacaaagcaccattttccctttcagcctatgcttggcagggcgtattttagccttaaaatctttgatctgatgtttggagtgttcatggcccttcaaagacacgacacatccaacacaccacttagaataatctaagagaatctaggctgttagttgagtttagtctgaaaatctagttacatgataaaagattatataggttcaaaaatgcaaaataaatcattaaatcacaaatcttaactgctcagagtgccactagaaataaaatggtcgaaacttatttctagatgttgaaaactgagccctcaccgaattaagtagcttttacaaggtcatgcaacttagtaatgagctaacatcagactgagcccaaaccccaattaggtatataacttaaaacctctcttactctagtgatggctcttatttttttaactaatgatgatctttcagagaccttgacttgcccaaactagggctgtagataaagttggagctacattttttgttgtcatggaattgctcaattcagatactctctgagggctcatccagctctaaatattttattattgttcttcttgctattcaaggttaccctttacatggacacatattgttcatcagtctctaaaatgttttttgtcttctaaacagacaagggtctttgcaatctcacaaacgtccattccattgccaaatttttccccaaatgcacaataatctccctctgtttatccaattcccattcactctgcaagacccagcttcccatctcctccataatatcttccctcacttttctggccttaatcaaattccctttcttctgagcacctgtagtccccaagactagtccacacaattgagaacacagtagtccactgtgtatgatgttatccctattatttcttgtgcacatcttatcttcccaattagatgatggccccttgaagacaagtaccatggcttaggcttaccaaattgttgtggagcagaacattgtgatgaatgagctcagagtaggtattcaagtaatactcagttgattaggcaggggggccagagaggagaacaaacattttcttgtttctccaaccattcttagttaagttctgggaatcctcaatgctaatacaaaaactgaaaactggcaagtttgattgaggttttgaactaattagaactaattagagagggcagggaaggacagaagataggctacttctaatcccatcctacaatcctttctttgaaatgtagaggaaatccacttgaaactgcccaagtgactgatagttgtttctaaatgagatttctacttctgcagcattgatttctggcactaagtcctgtccttagaagttaaccttttttctggggtaagaaaagctttactgaatccatgtgatgaaagataaatgatatggaatgttatgagccaaaattagtttaaaaaaataaaattcagttgcatacttacgtgtaccagaatgccacagcatcattatacaaggaagtggcattgggaacatcttaggaaaagatttcatattccagcttcatcttatttagcatgaatttattgagtgcctcatgacagtaacaatcatgaagatgataataatagaatattaaatattgaacaaaaataataaaaacgttaagagtccaggttcaaatgttaaacactctgggtttgcattctgattctataactctgtgtgggcaagttacttaccattcctgtgtctcactttccttgtctactaagtagagatattaatagcactagctcagagatttgttgtaaggattaaactgagaaatatgtgaaaaaatatttaaataagtatctagcacatagtagacattcagtaatattagcttttgatcattactattattattatcattaaagacttaaaaagactctccatagttcaggctctgtgctgggcaacttatatatgcatatttttagcagatacaaatattttttacaatttgtgtgtgttcactaatatatttcaaccaaaaggagttcctagcccatagtaggcactcagaaaataactgttgaatgaataagaaatttcatttactcctcacaacagccttaaaatgtaacaggcactcagaatataacagtgagcaagacagagtcctaattttcaggtctggtgtgataaatcaacaggcaattcctgtccagagtgattgctctgctaaggtagtacagggcttttgggagcagatatgagaaacacttaatccgaactcaagggaacaggtaagactttctggaggaaatgacatccaggctgaaatgtgaagcatgagtaagtgttagccaggcaaatcagaggtaacaatgtatggcaaatccagaagttaagaaagtatggtgacttcatttaaatgaatgtagttctgtatagatgaagtgagaggtgaagagaggagaaaagaagatgtagatgtcagtaggactatgagtacagtactggggacctggacttagattctaacagcagtgaggcaatgtaaattatttaagtgagtgagtgacatgggcttcggaatgatcactctggtcatttcttccatttcagtggactcccagaattctaacacttgccttgagctagatcaactttggtattcatttgcatattggtaaattttttagtccacattactagaattatagtcatttatggttttgagacacagacccatctttgtggcagtggtctctaagaccaaaactatcctgaaccttatgaacccatactctgtgggtaggcagttcttatcaaaagtagatccaattagatctgttaattgtgtcatagaatttctcaaaatttctcacttggctaccttcccaacaccatattatgactgaactagtagatctctctctgctaaggttagagcaaagaaggagagttaactttttgcgcattggctgacccagcctcagaacattttatattattttctaatattgaatgacagatggaaaattttcagggaaggaggtaggtggtaagatagatatggaacaaaaaagttccagattcctatagacctttcatttaatatgttattgtatcaatatttaatgtatattaaataacaatatattaccatgggtaacttcctatatggttagaattctgccaatctgaatttttctttctcagaattcaaggcgataacattataaaaataatagttatagatcctcaataggatatttcaagggaattacattcaccaaaaggcagcctttcatataaacatatcatgcaagctgacataaacacctaagtgaacctaaatgaaaacaatgttttctattgctctgagctctgtgtgaattggctcatcatagcaaaatgagcttcttagtggtcagtgcattgagaaaatggaagaactgtcatgtattcaaaaaccagaaccaagtactggattagagattaagaaaagacaatctttggttttggaatcaaaagtggggaagaattaatttaaagcaagattttagaaggatggtgaggagtttctgagaactaaagtgaatgggaggaaagaccttcatagtgatccccttaccctcacttttccctcagtgctttgttgatttcagtgtggcgagtagaaacggagaatgggccaaagaagacaggtgaaccaaaggaaagaaggggaggaaaagatgaaagggctgatggagagcattctccaagccactcagaatttggggagtaccactacagatagtgaagcacaaaagagcaaacatgccatcccctttgctcactgccaactccagcacgaagttgggcgactgccaggcaggcactcccagtcgtcaaaaagtgcaaatgttactcagggaacaattaatgtgagttgtgtaatgtaatatgggtcaaaaacatgaaaagacgtttaaaatgtcagcggatggctcagcacacccatcagccagccagagagcagaacacctgttttgcactcagtggcacagaagccacaatttagacaaaaaaaaaaaaaaagaaaggaaaggaaaaaggaaaaggggaaaggggaaagggaaagggaaaggggaaggggaaggggaagggaaggacagggaagggaagggaggggaagggaagcctggatggtcagggctgagagagagaggagacagggaccctggggatgcccacaggaggccaaaggaaacggctggaaacccggacagatttgttgtttgaggcagaaaataaaatgcttatacagttgtaatagaagaagaatggcttaaattttataacaattattcatcctattttgatatctggagtataattaaattcaaacttcctttgtttaattagccattaggtttgatgaagtacattttcaagtcaagcagaaaatgactttaaagaaaggtatgtctgcaagtgaaagggcagaggaaagtcaggctgatatgtgaaaaaacaaaaggacggaagagtctatctgcctttattatagaacccctgagaagattgcagcactgggtttttttttttatgcgggtggtgatgtggctaactgtgatgtgcccttttctgcttaattcaaagttcagcaaaagtttaaaaggaaatgaagtgaaaattgatactcaatagataatcacaggagaaaaagatcaacatgttgctgctgtggacttttttcaatgctatgaacttttttcaatgccctacttttgaggattcttttgatcatataatttttttattccctagtacttaagtttttgaaataaaggaattacctgctaaagggaattctccgtgtcatattttcaaaaggctcattttgttaccatgtgctttaaaagattccaggacatgaaagacaggaaacacatccatgtgaataagagaggttgagaattacagactcctttccagtggcataaaatctctttaataaaaactcttatatatgatatcaatggccttgcaaagacatttaggcaataataaactgcaaagtgatttagcatgtgcaaaaacccaccaagctgtaaacttacaccctttgacattaatctgtcatataagcaggagtaggtacctgacaagacttatattaaaatatgtaagttatgcctcagtaaaacaattgaaaattaatttagaagttctcgcttgagaaatcagtgataatgtgacacacattgaccattgtgggtaaaattaaaagaaaatagctgctctttttggccaaaggaatacttagaacatattcatagaattgttgagtattaaaggtgaataaaacctaacttttttgtccatctcttcattttatagttgcaaaacaaggcattcctctcatcatgatatctagaggtaatgttcttgcccgaagtgttaagagctaggaagtgaccatcactatcttgagactatcgtccacccattccaaggaagcataaactataaattccaacattcttatagactattatgatttaataaataacgtcgattggaactagagaaacagaacacatttacctgttaatatttgtagaataaacctcatgaaattacttatggaaacacaattttaagggatctgtagtgggttatcttatcttgagaaaaaaatcagagaccaaagttgtgtgtgtgtgtgtgtgtgtgtgtgtgtgtaataaatagatgacttctgaaatgaagtcatatacattcaggaaggaagcctaagttgtgtgtttagcagatgtattttgagaaatgcctattggtgagtagtattctgctctctaacaagcaaaaaagaggaaatgaatttaaattagaaccaaaggaatttaagttagatggaaagatcttattggcagtgaagattttataaaccctggaaaagattcctggagaggttttcaaattctctatctgaatgtacttaaaagaagagagatacctatcggctcagggtggttgaggtagagacctgcctggaagttgctttcagctgaattctctgcaagtccagattagttcctgacaatgctcaggatgtcaaagactgtaaatgctagacagtggcaagcaatattgccccttaaaacaaaaacaaaaacaaaactcaccaaagtaatcatttccttggaaagttaattggcatatggtagttggttataagtgaaatgttcaattgtaatacattcttgttttattttctttttagcctagtttccaatggaaagaagccttatgaaatttctctggcaggctatgccctgcttactacaatttttattttccttctgtcagttggttacaagcaaatctcttagaaaaacctaaacctaagtagcaatacatgtaccctctgagtaaattcctctgaaggaaataccctctcccttaactccaaaggaaaactttctctcctaattgaaaggagcagaatgattatcccaacaccatcagccctcttcttccttaccttcacagagtccacacaaattctcttcatcttgcagaattatttcttctcatttccaacccacaaacagcatatacactaacagttcataccaaaattcactaatttgctgtacttctctgcttatacagctgtgtgtctgtttaccccattgtgtttgccacaactattgtttggtttttattgcaagctcctgaaggtgaaggatggagtctgtttgacttgctttgcacgacactgtgtgtacatgcaggtggacaccatgtgaccgtccttgacaataatggtttctgacatgactggatgctcaaaaaataatcccatggattagctaaagttggagagagaggactcagtttgcagaatctgtgtcattggttggtcctcctatatgtcacataccaaggtgataactgtctgtcaggagtcatcagggcagtgagcactgtggacaagggcccaatcagcagctagaaaatctaagtctagcctaaaatgcacagaaatcaaaactgcatttatttgcatgctttcctttcaccatgacccgtccttctcttgtgtataaatccagtcttgctggagttctcagctcagagcagtctgccattgcccattgccataccaggctgttaaatctcagacacaccctggaagactatcaagttcacagtaacttgtttttcttatttctttgtgtttatagtctagagggaacagaactcatttttacaaagattaatatttcttctttcccaccaattcccacacaaccccttccaaccttcctttacatcagtcttcctcactgacccaagaagacagagataagtcaatccacatttcttagttaggttaaaaaattccaatgctttttcatatctagggtcttcaaagttaggttttcagagaacaaaatgattgatgaaaacctgtttctcacagaaagcacaggaaatgacatttcatttaattcaacaaatattttctaggcaccaattatgagccactcactgtgtattggggaaagaaaagggaacaaaacatagactctggcttcatataatatatttggaggtgtatgtgtctatgtgtgtgtaatagtcaatttaagattttattacgtgatcttaaatataataagattgctttattttggattgtggtaaggattaaatgatgtataatatagttaaagtatacttgacacagagcctggcatgtaagacatcctcaataaacaacagctgttactattactgaaagaggcttaatttagagcaattctggggggagtgctctctctggaaatcaaattttaccttggattaagggcaatgtattttgattgttatgggaagaagaggaatcatccaagagttggattctcaccgaactctccctggacagcaggacattgctgagttcacccactgccataagaaagttcttctcttagcttcttttaaacgtctgtttgaaaacttttcttactgtaaaatgttacatttcctgaaagaagcagcacatcataaagtgttttggcacagagctcattctacctgctcatctttttttttaattttattattatatactttaagttttagggtacatgtgcacaatgtgcaggtttgttacatatgtatacatgtgccatgttggtgtgctgcacccattaacttgtcatttagcattaggtatatcgcctaatgctatccctcccccctccccccaccctacaacagtcccaagactgtgatgttccccttcctgtgtccatgtgttctcatcgttcaattcccacctataagtgagaacatgtggtgtttggtttctttccttgcaatagtttgctgagaatgatgctttccagtttcatccatgtccctacaaaggacatgaactcatcattttttatggctgcatactattccatggtgcatatgtgcaacattttcttaatccagtctatcattgttggacatttgggttggttccaagtctttgctattgtgaatagtgccgcaataaacatacgtgtgcatatgtctttatagcagcatgatttataatcctttgggtatatacccagtaatgggatggctgggtcaaatggtatttctatttctagatccttgaggaatcgccacactaacttccacagttgttgaactagtttacagtctcaccagcaatgtaaaagtgttcctatttctccacatcctctccagtacctgttgttttctgactttttaatgattgccattctaactggtgtgagatggtatctcattgtggttttgatttgcatttctctgatggccagtgatgatgagtactttttcatgtgttttttggctgcataaatgtcttcttttgagaagtatctgttcgtatcctgcacccactttttgatggggttgttcttttcttgtaaatttgtttgagttcattgtagattctggatattagccctttgtcatatgagtaggttgtgaaaattttctcccattttgtaggctacctgttcactctgatggtagtttcttttgctgtgcagaagctctttagtttaattagatcccatttgtcaattttggcttttgttgccattgcttttgatgttttagacatgaagtccttgcccatgcctatgtcctgaatggtattgcctaggttttcttctagggttttaatggttttaggtctaacgtttaagtctttaatgcatcttgaattgatttttgtataaggtgtaaggaagggatccagtttcagctttctacctatggctatccagttttcccagcaccatttattaaatagggaatcctttccccattgcttgtttttctcaggtttgtcaaagatcagatagttgtagatatgcggcgttatttctgagggctctgttctgttccattgatctatatctctgttttggtaccagtaccatgttgttttggttactgtagccttgtagtatagtttgaagtcaggtagtgtgatgcctccagctttgttcttttggcttaggattgacttggcgatgcgggctcttttttggttccacatgaattttaaagtagtttttttcaaattctgtaaagaaagtcattggtagctttatagggatggcattgaatctttaaattaccttgggcagtatggccattttcatgatattgattcttcctacccatgagcatggaatgttcttccatttctttgtatcctcttttatttcattgagcagtggtttgtagttctccttgaagaggtccttcacttcccttgtcagttgaattcctaggtattttattctctttgaagcaattgtgaatgggagttcactcatgatttggctctctgtttgtctgttattggtgtataagaatgcttgtgatttttgcacattgattttgtatcctgagactttgctgaagttgcctatcagcttaaggagattttgggctgagacgatgggcttttctagatatacagtcatgtcatctgcaaacagggacaatttgacttcctcttttcctaattgaataccctttatttccttctcctgcctaattgccctggccagaacttccaacagtatgttgaataggagtggtgattcttgaattaatttttgtataaggtgtaaggaagggatccagtttcagctttctacatatggctagccagttttcccagcaccatttattaaatagggaatcctttccccattgcttgttttttgtcaggtttgtcaaagatcagatggttgtagatatgcggcattatttctgaggctaacgtcatcctgataccaaagcctggcagagacacaacaaaaaaagagaattttagaccaatatccttgatgaacattgatgcaaaaatcctcaataaaatactggcaaaccgaatccagcagcacatccaaaagcttatccaccatgatcaaatgggcttcatccctgggatgcaaggctggttcaacatacacaaatcaataaatgtaatccagcatataaacagaaccaaagaaaaaaaccacatgattatctcaatagatgcagaaaaggcctttgacaaaattcaacaacccttcatgctaaaaactctcaataaattaggtattgatgggacatatttcaaaataataagagctatctatgacaaacccacagccaatgtcatactgaatgggcaaaaactggaagcattccctttgaaaactggcacaagacagggataccctctctcaccactcctattcaacgtagtgttggaagttctggccagggcaattaggcaggagaaggaattaaagggtattcaattaggaaaagaggaagtcaaattgtccctgtttgcagatgacatgattgtatatctagaaaaccccattgtctcagcccaaaatctccttaagctgataagcaacttcagcaaagtctcaggatctacctgctcgttctaccaagattctagagcatttcagaacctggatcatatcccaaacacacacagcacatatttttctccttcctgcttcctcctaccatggtctagattatggttgttctgcagggcaagtgactaccaaaatacacttgaaatttttcacatttattttaaagttacataaaatgattttacagagcatcattttaatgatttagctcttactgaatacatatcaacaattaatcttaaacaggaataatacaacttttaacctcaggaaaaactaagtcaaattgtagtcacccagtgaatttcttttttaaacttgcccaatacaaatggcttcactggccatcttagcttacctatagtatttaattaatcaattattcaattaattaattgtatggttaaatatatgaatggatcatcatgtaaatgtcaagataattgaatacaagtatctcataatattattagcccaagcaaaggaatccacttacttcactctttttggttcaatttaagatttgctctatactctcaaatatctggataagtaaaagaagacttcctgccatgttcttctttaatatttaccattagaaaaagcctgtcttttcctgacctctgttatttagaagacctctgaccatgtcctgcatcaccattatattctcaatatgttttcctgactgaaggttcatccagttgtttcatttgaaaaaaagctagtatttcaccttccatatttcctcaacaagaatgaggaattctgggaaacatttgatatatttccatctatttcaaaagtatcagaaggatgcactagaatgaaaatcttataggtatcttctgtcaaacattgccacttaaattatagtatgagggcctaactttagcttccaactatggaagcttctgttctccagctctctaagctgatgttgctttttctcaaatttacttacatattgaagtgttaatttctcacacctaccttctttattccaaactaatagaatccaaagatttcatacaaacttcagttatttagatcttttcagtgttttcctttaccagattatttaggtttggcttctttgaactttgaaaccattaaatatggtcatgagaccattgcatgggttttattttttttaaaaaaagaaaaggaaaattaaggtctctctaaacataatgtactcaaaagaaagccagtgatctaccaatctagacactcgatggtgccttagtacatccttagggaattttttcctctcttctaatttatcatgattagctgttagttcagaattgatcctatttctttagaaatggatgtcataatcctagagttttatgagactctacaacctttagtttttgtaaaaaatcagccaaaggcttaaagagttccttcagatgggtaaagaaagggaaattatctctccccaccccttcctctagctctccaagcatgataagaagcatgaaaccaaatcagatgtactactctatgagaaggtaagaatagcttaaaggaacctcaagatgcctcacccaattgtctttttctaaatcctggcactttaatacaacacaaatgtgcagtccctatggaaaccttgtgcccaatttaatagcattgttgatcaatgaacatttgtcatgctccagacaactgccatgaatcagtaaaataaaatacagcatcccttaaaaaacttgaaaccaaactctgggatgatgtcaatgggataagaataggcagttcctttcttttcctgattcctcttcaccaatcttctccttcaacattgcatgaaagaatagaatctttatttccattgcctttattcatttactgcacagtcgtaaggattaaatgagactgtgcagataacacaattaggaaggagactggctcaaaggacatgtttaacaaatatgtgtttcctcttccttcaggaaccataagaatgtggtaagcctgttttgtgaaggaaattcaaaactggtgaagataggctatgttgaaatgcatatcaaaactcctgcctgatcatctgagagaatactatatattttttgaaatgttatgacatatctgtaaatgacaatttagattttgagtcttgttatcatacctggccactgaagcccagccactaagtttcctgcaccccagagtgaatgatagagaaacagcttgaactcccatgcactcaatggagtcattaagacgtctcattctggaggcttgtattaaactagcctccaaaaatgaaacacttttttcaacactttcagtgtgaaaggaaagtctttttattaagacttgttccttactcagtaaataaatcacatatttggcagcaataaaaatattggtgagaagtgaacgttattcatttcaaagcaaggagcctgttgagtggtggtacagtttttaaaatactgatttgacaaaagagctctcagcgaactcatgaaataattttatgcttttgtaatttttgtttgtggccttttcttttttcaaaattgaagctatgtacttaactctaatcagaaccattaaagtcttttaaaatgcccatatagtttacaatttctgttcttttttaaaaatcatgtcatgacgtttcttttgtagtgctaagttctgtgtttcaaaagcacaaagaatatttatttgtaaggagtctagtaaatatttatggaatgcctaccatgtgccaggcctggttctggttgcaaaagatgttacagtacacaaagcaagtttcctgctttggagtagttggggagagaagaacgataggggttgagacagactgaaaataaacaaaatgtataattaagtaaggaagctatcactgctactacagaattaaagagaattaaatatatataaaaatgagtgcttaactttagattggatgttcaagaaaaacctttttgaggaagtgatattcaagaggagattgaaatggtgaagcgtccagacagccatgcagtgctctggaggaagagcattatagacagaggaatggcaaagccctataagtaaggatcagctctctgtttttcataagttgaaggccagtgtggccagggtggaggataagaagggagaggtcaaggttggaaagaagccagagtgggaataatgtggggcatagcagccaggaaataagtttagattcattctcagtgccatggggagctattgggtatggggactggggtacagaagcaggagaatgccatgatctgatctacatttttcaaagtgcacctcatctgctgtgcacagagtagagcaagagtagaggtgtgtttaaggcaattgcaaccactgaagggatgtaagcaagaaaactgactcatttgttttggtttttgttctcaagatctgactatggtatagaaactggactatggtagaaacggaggtatcaaaggagccagagtgaaagaactttcagtaaatttggaaagtggtgtgaattcagatatggaggtcagatggtgtccttgggttataagaagagacaacactcatgaacaattattatgcttattatttataaacacacaaatataagtataaaactattaaggccacataacaaaatgagagtgatgcctctacaagctgagagacagcaaggcttgttaacaaacaccagagctggaaggggcagaagaattcttttctagaaccctcagagggggcatagccctgccaatatcttgatttcggacttccagactccagacttcagacttggagagaatatatttttgttgttttaaggcaaaaactaataaataaataaaacgattaatgcattcttatttataaatacataaattcttttaatcatcaccatattcaatggaataggtactcagctcattttccttatatgaagaatccaagtcaaagtggtaaatcaagtttccaaatatccaggtgtattagtcccttctcatgctgctaataaagacatacccaagacttggtaatttataaaggaaagagatttaattgattcacagttcagcatggctggggaggcctaaggaaacttactacaatcatggtgaaacgggaagcaaacacatccttcttcacatggcagcagcaaggagaagtgccaagcaaaagggggaaaaggcccttataaaaccatcagatctcatgagcactcactcactatcctgagaacagcataagggtaaccaccctcatgattaaattaccttcccctgggtccctcccatgacacatggggattacgggaactataattcaagatgagatttgggtggggacacagccaaaccatatcattctgcccctggcccctcccaaatctcatgtcctcacatttcaaaacacaatcatgccttcccaacagtctcccaaagtcttaactcattccagcagtaactcaaaagtccaagtccaaagtctcatctaagacaaggcaagtccctcccacctatgagcctataaaatcaaaagcaagttagttactttcaagatacaatgggggtacaggtattgggaaaatacaccctttccaaatggcagaaattggccaaaacgaaaggactacaggccgcatgcaagtcaaaaatacagcagggtagccaaatattaaagctccagaatgatctcctttgtctcaatgtctcatatccgggtcatgccgatgcaaaatgtcagctcccacggccttgggcaactctactcctgtggctttgcagggtacagcctctctcccagcttttttcttttttttttttttttaaactttcttttttttattattattattatacttttaagttttagggtacatgtgcacattgtgcaggttagttacatatgtatacatgtgccatgctggtgtgctgcacccactaactcatcatctagcattaggtatatctcccaatgctatccctcccccctccccacaccccacaacagtccccagagtgtgatattccccttcctgtgtccatgtgatctcattgttcaattcccacctctcagtgagaatatgtggtgtttggttttttgttcttgcgatagtttactgagaatgatgatttccaatttcatccatgtccctacaaaggacatgaactcatcattttttatggctgcatagtattccatggtgtatatgtgccacattttcttaatccagtctatcattgttggacgtttgggttgggtccaagtctttgctattgtgaataatgccgcaataaacatacgtgtgtatgtgtctttatagcagcatgatttatagtcctttgggtatatacccagtaatgggatggctgggtcaaatggtatttccagttctagatccctgaggaatcgccacactgacttccacaagggttgaactagtttacagtcccaccaacagtgtaaaagtgttcctatttctccacatcctctccagcacctgttgtttcctgactttttaatgattgccattctaactggtgtgagatggtatctcaatgtggttttgatttgcatttctctgatggccagtgatgatgagcattttctcatgtgttttttggctgcataaatgtcttcttttgagaagtgtctgttcatgtccttcgcccactttttgatggggttgtttgtttctttcttgtaaatttgtttgagttcattgtagattctggatattagccctttgtcacatgagtaggttgtgaaaattttctcccattttgtaggctgcctgttaactctgatggtagtttcttttgctgtgcagaagctctttagtttaattagatcccatttgtcaattttgtcttttgttgccattgcttttggtgttttagacatgaagtccttgcccatgcctatgtcctgaatagtattgcctaggttttcttctagggtttttagggttttaggtctaacatttaagtcttcaatccatcttgaattaatttttgtataaggtgtaaggaagggatccagtttcagctttctacatatggctagccagttttcccagcaccatttattaaatagggaatcctttccccattgcttgtttttctcaggtttgtcaaagatcagatagttgtagatatgtggtattatttctgagggctctgttctcttccattgaactatatctctgttttggtaccagtaccatgctgttttggttactgtagccttgtagtatagtttgaagtcaggtagtgtgatgcctccagctttgctcttttggcttaggattgacttggcgatgcgggcttttttttggttccatatgaactttaaagtagttttttccaattctgtgaagaaaggcattggtagcttgatggggatggcattgaatctgtaaattaccttgggcagtatggccattttcacgatattgattcttcctacccatgagcatggaatgttcttccatttgtttgtatcctcttttatttccttgagaagtggtttgcagttctccttgaagaggtccttcacatcccttgtaagttggattcctaggtattttattctctttgaagcaattgtgaatgggagttcactcatgatttggttctctgtttgtctgctgttgctgtataagaatgcttgtgatttttgtacattgattttgtatcctgagactttgctgaagttgcttatcagcttaaggagattttgggctgagataatggggttttctagatatacaatcatgtcatctgcaaacagggacaatttgacttcctcttttcctaattgaataccctttatttccttctcctgcctaattgccctggccagaacttccaacactatgttgaataggagtggtgagagagggcatccctgtcttgtgccagttttcaaagggaatgcttccagtttttgcccattcagtatgacattggctgtgggtttgtcatagatagctcttattattttgaaatacgtcccatcaatacctaatttattgagagtttttagcatgaagggctgttaaattttgtcaaaggccttttctgcatctattgagataatcatgtggtttttgtcgttggttctgtttatatgctggattacatttattgatttgcatatattgaaccagccttgcatctcagggatgaagcccacttgatcatggtggataagcttttggatgtgctgctggattcagtttgccagtattttattgaggatttttgcatcaatgttcatcaaggatattggtctaaaattctctttttttgttgtgtctctgcctggctttggtatcagaatgatgctggcctcataaaatgagttagggaggattccctctttttctattgattggaatagtttcagaaggaatggtaccagctcctccttgtacctctggtagaattcggctgtgaatccatctggtcctggactctttttgcttggtaagctattgattattgccacaatttcagatcctgttattggtctattcagagattcaacttcttcctggtttagtcttgggagggtgtatgtgtcaaggaatttatccatttcttctagattttctagtttatttgcatagaggtgtttgtagtattctctgatggtagtttgtatttctgtgggattggtggtgatatcccctttatcattttttattgcatctatttgattcttctctctttttttctttattagtcttgctagcggtctatcaattttgttgatcctttcaaaaacccagctcctagattcattaattttttgaagggttttttgtgtctctatttccttcagttctgctccgattttagttatttcttgccttctgctagcttttgaatgtgtttgctcttgcttttctagttcctttaattgtgatgttagggtgtcaattttggatctttcctgctttctcttgtggacatttagtgctataaatttccctctacacactgctttgaatgcgtcccagagattctggtatgttgtgtctttgttctcattggtttcaaagaacatcttttttttttattattatactttaagttttagggtacatgtgcacattgtgcaggttagttacatatgtatacatgcgccatatttctgccttcatttcgttatgtacccagtagtcattcaggagcaggttgttcagtttccatgtagttgagcggttttgagtgagattcttaatcctgagttctagtttgattgcactgtggtctgagagataagtttgttataatttctgttcttttacatttgctgaggagagctttacttccaagtatgtggtcaattttggaataggtgtggtgtggtgctgaaaagaatgtatattctgttgatttggggtggagagttctgtagatgtctattaggtccgcttggtgcagagctgagttcaattcctgggtatccttgttgactttctgtctcgttgatctgtctaatgttgacagtggggtgttaaagtctcccattattaatgtgtgggagtctaagtctctttgtaggtcattcaggacttgctttatgaatcttggtcctcctgtattgggtgcatatatatttaggatagttagctcttcttgttgaattgatccctttaccattatgtaatggccttctttgtctcttttgatctttgttggtttaaagtctgttttatcagagactaggattgcaacccttgtctttttttgttttccatttgcttggtagatcttcctccatccttttattttgagcctatgtgtgtctctgcacgtgagatgggtttcctgaacacagcacactgatgcgacttgactctttatccagtttgccagtctgtgtcttttaattggagcatttagtccatttacatttaaagttaataatatgtgaatttgatcctgtcattatgatgttagctggttatgttgctcattagttgatgcagtttcttcctagtctcgatggtctttacattttggcatgattttgcagcggctggtaccggttgttccattccatatttagtgcttccttcaggagctcttttagggcaggcctggtggtgacaaaatctccagcatttgcttgtctgtaaagtattttatttctccttcacttatgaagcttagtttggctggatatgaaattctgggttgaaaattcttttctttaagaatgttgaatattggcccccactctcttctggcttgtagggtttctgccaagagatccgctgtcagtctgatgggcttccctttgagggtaacccgacctttctctctggctgcccttaacattttttccttcattcaactttggtgaatctgacaattatgtgtctcggagttgctcttctcaaggagtatctttgtggcattctctgtatttcctgaatctgaacgttggcctgccttgctaggttggggaagttctcctggataatatcctgcagagtgttttccaacttggttccattctccccatcactttcaggtacaccaatcagacgtagatttggtcttttcacatagtcccatatttcttggaggctttgctcatttctttttattcttttttctctaaacttcccttctcgcttcatttcattcatttcatcttccattgctgataccctttcttccagttgatcgcatcggctcctgaggcttctgcattcttcatgtagttctcgagccttggttttcagctccatcaggtcctttaagcacttctctgtattggttattctagttttacattcttctaaattttttcaaagttttcaacttctttgcctttggtttgaatgtcctcccatagctcagagtaatttgatcatctgaagccttcttctctcagctcctcaaagtcattctccatccagctttgttccatcgctggtgaggaactgcgttcctttggaggaggagaggcactctgatttttagagtttccagtttttctgttctgttttttccccatctttgtggttttatctgcttttggtctttaatgatggtgatgtacagatgggtttttggtgtggatgtcctttctgtttgttagttttccttctaacagacaggaccctcagctgcaggtctgttggaatacgctgccgtgtgaggtgtcagtgtgcccctgctgggggtgcctcctagttaggctgctcggggttcaggggtcagggacccacttgaggaggcagtctgcccgttctcagatctccagctgcgtgatgggagaaccactgctctctttaaagctgtcagacagggacatttaagtctgcaggagttactgctgtctttttgtttgtctgtgccctgcccccagaggtggagcctacagaggcaggcaggcctccttgagctgtggtgggctccacccagttcgagcttcctggctgctttgtttacctaatcaagcctgagcaatggcgggcacccctcccccagcctcgctgctgccttgcagtttgatctcagactgctgtgctagcaatcagcgagattccgtgggcgtaggaccctctgagccagatgtgggatataatctcttggtgcgccgttttttaagcccgtcagaaaagcgcagtatttgggtgggagtgacccaattttccaggtgctgtccgtcacccctttctttgactcagaaagggaactccctgaccccttgcgcttcccaagtgaggcaatgcctcgccctgctttggctcgtgcacggtgcgcgcacccactgacctgtgcccactgtctggcaatccctagtgagatgaactcagtacctcagatggaaatgcagaaatcacccgtcttctgcattgctcacgctgggagctgtagaccagagctgttcctattcggccatcttggctcctcctctcccagcttctttcatgactggcattgagtatctgtggcttttccaggtgcacaatgcaagctgtcggtggatctaccattgcggggtctggaggacaatggtcctcttctcacagctccaccaggcagtgccctagtggggactatgtgtggggggaccaaccccacattttccttctgcactgccccagcagacattctccatgagggcctcgcccctgcagcaggcttctgcctggatatccaggcatttgcatacatccttcaaaatctaggcagaagttctcaaaccacaattcttgactgctgtgtacccacagactcaacatcacatggaagctgccaaagcttggggtttgcaccctctgaagccacggcccaagctgtaccttggcccctttcagccatagctggagaggctggaacacagggcaccaagtccctagggtgcaaacagccagcccacaaaaccattttttcttcccaggcctctgggcctgtgatgggagaggctgccatgaaggtctctgacatactctggagatattttccccattgtcttggtattaacatctggctcctcattgcttatgcaaatttctgcagcaggcttgaatttctccccagaaaatttgttttttcttttctatcgcatcatcaagctgcaaattttccaaatctttatcctctgcttcctcttgaacactttgccacttagaaatttcttccaccagataccctaaatcatctctcttaagttcaaagttccacaaatctctagggcaggggcaaaatgtgccagtctctttgctgaaacatagcaagagtgacctttattccagtttccaacaagttcctgatctccatctgagaccacctcagcctggacttcattatccatattactatcagcattttggtcaaagccattcaacaagtctctaggaagttccaagctttcccacattttcctgtctttctctgagccctccaaactgttcccacctctgcctgtttcccagttccaaagtcgcttccacattttcaggtattttcatagcagcaccccagtaccagtaccaacttactgtattagtctgttcccatgctgctaataagacatacccaaggctgggtaatatataaaggcaagaggtttaattgactcacagttcagcatggctggggaggcctcataaaacttaccatcatggcggaatgggaagcaaacatgtctttcttcacatggtggcagcagggagaagtataagtgaaacagggagaagcctcttacaaaaccatcagatcctgtgagaactcactcactgtcacaagaacagcatgagggtaaccgcccccatgattcacttacctcccactgggtacctcccacaacatgtggggattatggaaactacaattcaagatgagatttgggtgaggacacagccaaaccatatcaccaggaaaagtaaatggcaaatctaggattcaaagctcagtctatgtgtccataccaagatttttctgttctgctatcatgtgcccagaccagaattaacaaaggaaaaatactgaaaattccattctaaataataaaacaatattctataatataaaatacataatttatttaactgtattgatttttagcttgtttccatatctttactcctataaatagaactgtagtaaacattttctatattatttaccttatttctgattagttccttatctgaattcctagaagcatcaaataatataaatatttttaaaactctgggtatataatgtcaatttattttccagtaagtctgtgccatttatactctcacttaacccaaccaacattaaatatattttcatcttggctgatttgataactgaaattttaatttcatagattaatttgcatttcctttcattactaatgagattgaaggctttctaatatgtttattagctttttaatatcttcttttgtaaatttaattggctattttcctatatggtgttagtatttttttcttggtgatttgtaagagctctttatattggaaggatactaagactgttttttaattcttgcaaacaacttttcccagagtgtattccacattcagttttccaactttctgttgtaaaaatataataaatacaagagggtatgctccagctatctttgctgcataataaaccacatcagagtttagcagcataaaacaacaaacattttatattacaattttagtagtcaggaattgaggtaggtctagaagctttttctgctctcatgacttactcatctggcaactggttaattgaagagcccaacatggttttactcacatgtttagtaccctggcagtgataaaaggaaggctgagatttgctggcattgtcaacaggagtgcctacaaatggcttctcctgcgtagtggtctctaggtagccagacttctcacttggagactcagggctccaaaaaacaatgttccagcaaaaaaggtcagcctcacggccttttgtgatcctgctgcagaagttacataatgcctgctccactgtgctcaattggtcagttcataagctctcccagattcaatgggagagaacacagaggagaaacaaagaatctggccatgttttaaaacctccataaggtataacattttttaaggaataaagcaaactccccttcaccttttaattttgttcatgatattttcacctgcaactggtttttaagtatttatatatgcttatctatcttttggtttctttcattgcttcataattcatttttaaaaattatttttaagcatctgtctacaacatcaaggacattaccaattaatatatttagaacaataattttttgatcttcaaatactttaagtactaagtattgtagttgcattaatttaatttgattcttaattcttttcatccttagatttccatcagtgacatatttgaaaattcactttataaatgcaggtcagaccatacatttaattatgcagctgctgtgtggagaagaaaaaacaaatctaactaaataattcttgcttagtactgtgccaaatttctggctcattcttcaaaaattaactgaaatacaatgagttacacattgcctgtgtagctaatggttccctttagttcctgcaatggtgcttgaatattaaataatttgattcatttcataaacagtaattgtagcactctttctcacagtattatgaataacaaagtaaaaaagtgtcatcacattaatagcaacaaaaatgtcttttaattagaaattattttaaaggacattcttctggatcatagagagaaaagaacctcttttaaaaatatgtggtaagcactcaatgttaaatgatccttagtctcagggttgaaaaacggcaatttaggcatcttcactgttttttctctgcttccactattgcatttcaaaaagcagtttcatcagctaccaaggtgtgggtctgggaaagttgttcaaagagagttaaactgaataagatacatgacatgtacataacagtgatcttcagcatttgtattatgctatgtatcttccccttgttttattttcaccataactagaaagaaaaaaaatgaatttttagaagaagaagaaaaattgaaaaaaatcttattgtctaatgcagttcagcaccatgagggaagagtggaatctaattcatttcttcaacattgtatccccaacactaagcattatactttgcacatagtaggtgctcaataaatatttattgaagaatgatataagagaggcacaaaaattacttataggccttttcctgatatccagtctgaatctggagagtttttttcatggaagcaattacctttgttgtatatctcctttcatatctgtctgtatttcctgccagtcttctgcaagatgtcatactacatgagagtggactagaaagtcaagctcttgagtccatttactatcactaaactttattactaaagataatttgaaatcccatggctttccagaggcaaagtttctcaaatcacctatggctaaaccaaagtttatgtctaaatatctacaagttgagccaaagtgcagggtgctgctgtatccacccttcaggcctgaacacacattgtgtagcctctgtagggaaagccacatgtcagagcctgggccttgtactttaggaacattactgcttttttacagtcatttcgcagatagaagacattcaagtacttcctcattttgtgttgagtaccaaatacagagaaaatctagaactacactctctaatattagagccactatccacaggtaaattaattaactcaaattacttaaaattaagtaaaactaaaaattaagttcctccatcacactagccatatttcaagtgctcagtagcacacttgactagtagccaccatactgaatagtgtaaagatggaaaattttcataattacagaaagttttattggacagtactactctagaatataccacttaaatcacatttcgaacttactaaatttgatacccagttctgcatttataacaaatactggctttcaaactgatgtatttatctaaatgactgaagttgttcctcttaaaatattttttgaacagcaaatgtagataattcttttttttttttttttgagacgtagtctcactctgacgcccaggctggagtgcagtggcgcgatctcggctcaccgcaagctccgcctcccaggttcacgccattctcctgcctcagcctcccaagtagctgggactacaggcacccgccaccacacctggctaattttttgtatttttttagtagagacggggtttcaccgtgttagccaggatggtctcaatctcctgacctcgtgatccacctgcctcggcctcccaaagtgctgggattacaggcgtcagccaccgtgcctggccgatatttcttaaacaagttcctgtgaaacacacgaaaataaaatagagagtatctattacccaaaacagagttaaatttctgaaatacattttaattggagacaagtcccatatgctttgtaaaaagtctagggtagagagaacttacaaagtttattcaactagttaaattgtgccaaaaactcatatgaaaacataaaagtgtcaccatattaaagccccatcacaagtgatttgataaataaccaagaataatttataactcaaatactgctatatgtaaattgacaggaaatgtattgtttaaaaagttgacccttcttaagtaaaattaacttttttccctgaggtattattaatatttcttcataaatttgcattatctatggcaaatgcccaaagtctttccaattatctccaatatgtattaatggaaattgaactggtgagaacttaccatataatataaccatgaaaagcaataaagatatacaatttgttgtttatttgaacaaaaactacatatagtatagcagaaaaataaactaatagcattttatgtatttatacattcctattatgcaagttctcctatgatccagaataatactttgataatgcacttttaattgccttgagtaaaagtatcctcttttttctactttagaagctgttgtgaaggcagagcagcatctgctgaagagacagaaaccagccccagaggtgtcacaggaaggcaccagcaaggacattggtctttgatttgattcagcagtcctgtcaagtataaatgtaagtgtgaggagcaacagagggcagggcagtggtctgggtggtccacaggtaaagccgcagatcgctgtccaggagcacaagggcccttggcagatgctcagtgtctagcctgcctgcatgtcctgactcccatccctatccccatcgttgcaaaagccttgagaacattgctactaatattaggttttcaaatcccctgtagtaaaatacatgtgcagagtgtgatcctagctgatttttaagtctaggcatgttgaatagagtcttaaaataatcatttccatagaacttgactaggtatccaaatgttcaccagatgctaggagttagattttgcagaggaaaattgtgaacttaagcttcttttcatgattcagcagagggttttaagtaataaaagatctggagatttgtaacataaataattccagtgcaaatgggaaaattaaaataatcttatcatctctcagtcatgtctatatatgtttttataccattatcatatttctcttaattggggcaactttttttctggctgatattttatagttttaagttatgagctgtaatgaagaaatgattcctttcagacgactgaagtgatatgtactaaattttcctaaaaacaatctaggatgaatgaaacagagcatgatatgatggaaatggttttctttgtatgtggtattgaatatactcacagcaaaaaataataacagcatgccagaatcccttttattccttaattgatctctcagcagaagcaataaaaacataaagtacatcattaactttcaaaccttgatggaaaaaaaaaaaaccacaacataccgtccatttctgacaagtagacattatctcatagtatccacagccatcctatgcttattactattgcctggtcttaagtgtgacttttggacacacgactcaatatttcctgatatataatagtacaatggtttttatagtctatttaattttatttcataattaaaagaatgaattgctaagattccccagatttttcttgttctttttgggacagggtggacacctgaacgaaaggaaaagcacagcatttagccctatcattaatccctcattgactgcatcctgtctagaatgcatccatttagagttcctggagaaatgcaaatacattaatgattttactaaggcattacatttttaatataggtaccactaattattttggctggattccatcaaagccagatgttctccaaatgaaatatttataatgcaaacccagggaataaaaaaatacatgctcattgaagcagcagattataggactcgtggatattagaaaaactgaggaaagaggcatgatgtgggtaacagccataatgtcagagtaagcctctgaactcaacccagagaaactttgtaattgttgcaaccagtgataggctcggcttctggatttcttgtaacaaaatcttactgccaagggcattgatgagctctcccagtaaaaaaagtataataataatgttaaactaaatcataaaaatgcagaaggtggttattaaagggcagaggagagaaattgcttgtaaagttctggtggaaatatcaaaaatacattttattgaacttttaagaaattaagctctttgtttttaaactagggtgcaaaagcaataaaacttaaaggccattcaataaactatttcattcaatggtcatcagcaatgattcagcagtaaaaataaaaatcacatttattcaacatggtcatcaattcaggcaggcctgaagcttacaaatgataagtttgtcagtgaaaataaccagctgaaagtatttttaaatgaattttgattgaaaaaataataaagaattttttgaatgtacacctttttcttagtgaaaatggacttggtttaacttgacatagtataaaactcttaatgttttatgtagtttattaagttctatgaagaaatgtatttgaaacaaatgtagataatgaccaaaaaagcttaaatatgaacaccatgataggcatacaattaagaaaatggaaatagatcatgataactaatcttttgcatgccctccaaaagcacagaatgtaacttttttaattatttttaataatctagagttttctttctgatccttttaccttccaaaaatatagattcctgaatgatagaacatagacattttggtagacagattatatattttcctcaagttaaataacatatacctctaagcaacaatcatcataaaaacaagctttttgctcattaagatacctaatgtgccttacacatagtatgtactaaataatatgggttgaactgaattattcccattttttgttcagctattaatgtgtctcttggatttacactagagaggtggtgtcccacacatgggaattaatgagctacatctgtaaccaaaaatatccacggaaaacctgttgaattgatccatatctgttttattaatcaagcccactacggaagggctttcttgtggttgtactacactttggaaataaatagagtggggaaaccacagttcattttaaaagttgtttgaaactttgaagaacacgggattttatattatacgacagcaataaactccaatttttgatgactgtaattctgagtatataagtatataaatattctgtacatataattttactgcagaacattatgactgtggccaagaagacccttactgttcaatatggaatttacttgttactgccactgtcttccttcctcaattttttaaaataaaaagacttttaaaaataaaaagaaattttaaaactagcttggtatgaatagcctttagctgaagcagatggctggaagtcagaagccccagattctatccttcattctcctaccaacttggaatgtggccttgggcaagtcatgagagtaaatctacaacaaaagagctaataatgctttacatgtgtatggtgttttatgatctaacagagcactttcacatacaatatcttatttaatcttccccgcagcttcctgaaaagagtatggcagttattaacgatccccattataaagaggaggaatttgagacccagtgaaactaaatcactttttcaagtcaggaacagtcatagtctaagattcccggctggtctttgtctttcctctacaccacattgccaccctctggcacctccaatggtggcaaagcaggaatgactatagctgcactgttcaatatgatagccactaaccacattctggtactgagcatatgaaatgtggctagtcccaattgagatgtgctgtgagtgtgaaatatacaccaaatttctaagacttggaatgaaaaacagaatgtaaaatgtctcatcaatactttatatattgattgcatgttgaaatgatatttttaatattttgagttaaataaaagtaataagtataaatatattaataaatattaccaaatatggtttaataaaattaatttcacctgtttctttttacttattaatatgataataaaaaacataaagttgatatttgactcacattgtccctatgcgacagcactgaccagaggattccactgttcagagcccacatactaatttcacagtactggacttgtttatgtacctggcttgatgtagctgatacaaattccctaagatgctgtcaaatagagggcaaggtagattagcagcaatgatttgggcattctcacacatcttccacatgcaggaaaaaatctggcttcattagttgatgccccaaattgctcattcattaaaagggtccattttataccgttgaatacttgagagacttcgaagtaaaagtgctatggcaagaactataaattagtatggctctatagcactctttattttcaaatatgttcccattaaacattatgaatgaatgagacattaaactgttaggctgatatatactatgtaaaataataattatatataactttgttgtacagtatgttttattctacctacaaagtcattaagatattttacatacaatccctaaataaatagcttatttctgttatggaacaatctaactgaaagtcctcaggaaaaatgagttcttatttagaagaaaaaatatgtatagtaaaaaatagctcagataactaaaaactagcatctatttggcagttattatgtgggctcaagtaccatgctaagagttacaccaaggttctctcacttcatctttacagggctttgaaaatcagcaagagggaacagaaccaaaggtcttaaccactactgcttcttatttcaaagcaatttaaaatcataactcaacctatcatgacagtgtaagaatatttggaattgattttattttattcatttaagctccacaagcatctacctagaaaatgcaatggatcaggaacagttctagacactgagggaatattgagcagtaagaccagagctctactctcaaagagaacactgattgataggtttatgaacatgcttttgaaaaatgcatacttatgactaaatagaaggggagtcactattcatgttctaaagggtttctttatgttccaatagaaatctttatagtgctattcctgtttgttaaaatttacctattgttcataaagcaaaggtcttatgtaaaaaaaaattaaaaaataaactacatagtttgaatttcagaggtttgctttcctccattatactcacttggaagaagaggtgctgaaattaccataaatattttctagaacaaggagagatgaaagcaaacaaacaaaaggaacctaaatcaaaatggctctaagaaaatcacaaaataatgaaaactaaagagttttataaacttttatacaataatagtgataagttatctttgaaggtagagatttaaaattatgcatgagttaactatatattaattgtttaaagaatatttcaaaatagaatgtataacttgttgccaacttctttttctttttttcttctttttttttttttttttttttttttgagacagattcttgctctgttgccacggctggagtgcagtggcatgatcttggcttactgcaacctccacctcctgggttcaagcaattctcctggctcagcctcctgagtagctggaactacaggtgcacaccaccacacctggctaatttttgtatttttagtagagacagggtttcgccatgttggccaggctggtcttgaactcctgatctccaggaatccgcccacctcagcctcccaaagtgctgggattacaggcgtgagccactacacctggccccagtttcctaatgttcatgtttacctagaattaaataaaaagaaaatattaatagccaactctgggtggcagaattttagacagttttgtgccctcatgtatactcttttgtaaatttttcaaaaaaacatatattgcttttataattggtaaacagaaaaaatattgtaattgactccaaaatcgataggtgataaagacaaaattgtccagggggagtaaaatgcaaattttgctctcaatcacaaaatttttaaaaaataataataaatgtaataggttcttccttccaggtgttattgccctttctttgattcaagataaagcaacctgtaggctattcaacttctctagacaagaaaggttaaaaattggattgaattttcaagattttcttgagaaagcatttcacctgcagctatgaacatgagtgtaaagatcaaagttgtaatacgggctggtaaagctgaaagttgttattgtggcaatcagaaaagtagagcatcattaaagtgtacctctttcaccttaaaacataaactggccatcaatcatttctaatggcatctacttaaaactggccttatgattggctcctaagtgtgtaaaatgtcaggtggaaatacataaacacatctttgagctggatagagtctcagtgatcctaaaaagtgaaatatagagctattttagagatgccatttaaaaatttatggagagagatttggtcttataatttctttcatgaatactaaaattttactacaaagaaaattcagaaatgagttatttgtgccatttaatcattaaatcataaatccacagaccattagagctggaaggggccttctagattacctcctccaatgccaatattttgcagatgagaaagtaggaacagaaaatttattttctcagggttaagcatggtggctcacacctgtaatcccagcaatataggaggccaaagcgggcagatcacctgaggtcaggagtttgagaccagcctggccaacatggcgaaaccctgcctctactacaaatacaaaaattagccaggtgtggtggtgggtgcctgtaatcccagctacttgggaggctgacgcagggagaattgcttgaaccaggcaggtggaggttgcagtaagctgagatcgcaccactgcactccagcttgggcaacagagtgagactgaaaaaaagaaaagaaaatttatcttctcaggaaaaagtaaaatcactcaaaaatatcttaaagaatccagaaacatcttgaatcttactgacgaaaaattaggtattttgaatcctactagaactttaattataactcgaatttttagtttggttgtgggcagtcctacgcaatgaaggaaagacgctaacagtgactgtggaaagcacattcacaatgaacacttataaagttaaaactaaaaataaaacagaccaatgatttcagaccaggttattcattcattactcagcttcctttctttagtgagtcaagcaattgaaatgagcgttcttagccacttttaagacacaattcttctattatcatgaaaaattggctacttctaaagttgctgatatgctgaagaataatgggacattcattctttgagttaaaaaatccaaattattgccaaaatcctcctgatttaatgcatttatgaaaatatgcttataataaaattatatatattaagaatatactcctcatcccctgcaaatagatacttactttgcattatggacatcctggaagaagtaaacatgaaagctctttttctaagtttaatgttgatctaagaaatggaaaatagtaacacttggttttaaggaaactagcacagtgtggacatgttcattgtcatctgtaaagtagaaataagagtagactcttgcaaaatcatttaagaattaaatcaataatagatataaaatggttagtacagggtttggtcatagttaacatttaataagtcccagctattagtagtagtggtagtaatattattattatttataacatgatcactcttctactactcccttcccttcaagcaaaactcttgtgattcccctacactattttatggcgccatgtgcttgtatattctgatccctctccccaaatgccctatcctgacttctatatctgctgaactcctacttatcacccaaggtcagctccaaagttttttcctcttacctgcgttacctaatccctgattgcactcacctatttcccatggttctctgcatatatccctctcctatcaattgagatgaggacttttacttgattctccctcacgccccccacatgcccccccacacacacatgcatgtacacatatgcacacactctggactacagtgaattcatcatactcaattttgtatcatcatagaaatgtctattgaaatgaacaaactcccgcataaataaatgactttttaatttcatgagtaggtatcaggctagaatgtgcacctagtggcctcagtttagagggggagaaggggagatgggtatatgaggaaagctgggacatgcaactcaccagccctggagcccggctctgccacatgcctactgctatgacttgtggtaaatcatttaacttccctggacctcagttttccttctcagcaaaatgggaggactgggcaaaatgttatctgaggacccttccagcaccaacctttatatatgatgctatgcactggtttatctcaatggttctcaaactttagcagacatcagaatcatctggaaggcttattaaaatactggtcagcagatctgatggggcccaagaacttgcatttttaacaaattgccagatgatggtgaggctactggcagggggaccacactttaagaaccactaactgatcttcttgacacaggatcctgacactgtcctgttgttatctggtgaaaggcactcctgatatgataagatgcaggcaagtaaacccacacttctgtgaggctgccatcacaaggactaggtgcctatgggtgagccccaagggtgaccacagaatgaaagctttgctgactggagttttgttaaaggctcactttgtgggaaagaaactgcctgacttctcaatgctatagggtatagaaaacactgacgccagggttggacccatcagttagtaccgctgcagctgaagtcacatggatcacaattgccatctagtgatgactttgaattactgcatcaagagactacagaatgaaatgctgctttttcatttagaaactgctttttttttacacaaaactatgttcaaaatgagatcccttaaggataaagtctaatgtgctccggtcttatctacatttgtatctcagtactatgaaaataaatacatatatagtacttactatgtgctaggcatggttctatgctttatatatgttcaattattcacagcaaacccatgagataatacaaattttcccagtttggagacaagaaataaaactacaaatgtacaaagcaatgaaaagacttgcttgaggttgcccagtcagtaaaatggtagagcttggactgaacctagacagctactgggaagataactacactaaccagtttctcttatatcaatttaaaacatagttgctgaaacaattagtacttgtaaactgttgtcagttacagatatgggtctgcaaaattttattaagtatacactgaataaataatttttttctgatccttccaaatgaaatcagcttatatccaataattaaagaaatgtttctacctacagaaagccaaatgcaacaaaatgagcaccaacttggattaagatttggaatcatttttccacctgctatacaatcttagacaagtcacttagatccactttttcatctatgaagtagaaaaaataaaaccatagtttacatagctatgtaattcccaaaaatgtggtttaggggttctgtaaagtcagattaaattttagagtagctgctcaagttatccactgaatgcgatcacaagagcaaagagggagatcatggataataactatactgtttttttttttcaaattgtctctcatgtgtgaaagaagccaggacaagaggtttgatctcctggtctatcgtccataagtgctagcagtaaacaataacactcatggtgtttgtgggagaattaaagagctcaataagaaagatacacatttcctttatttttctgaatactgtacttggcctgtgcacctgagctctgcatccctgcctgttctctgcctcccaagggtcctcaccaaagaactcctacagaaagatcacatatttgccagtggattgaggttcaaccccctctcactccaaccttctcttaccagagatcttcttggatttaaaaaccaggtccctgataatccttttagctccttatctaaaacatctcagttaccaaataatttatctcaatagaccaaaccagagttatcaaaccaaagtactacagtactaggtttctttgcacctgtatatgtgtaacatgctaagacttgctggcatcaaattcatggtaatgaaggaaaaataaacatagagtcagaggaataatgggtaacaattaaaatacagtagggtaaactatcagtacctcattttagtagatttcttgatgtcatttcaagtatttgcacatatttagtcaccaaagcaaccctaaaattaggctagataagcttattatcaacaccatttgagaaataaagatattgacacacagaagtgtaaagaaaaacaaaggaaattgaagcaaagaaactttaaacaacttgaaaaaataagtgagggttcatatatcctagttattaggcctatgcttggccccacaattatagtttaacaatcaaatcctgaaataagatgactccctctgatagttgagttttttaaaagttctttatacaaatatagtagaagtaaatgaataattagacttcaaggatagtaaacactccattaattcactcaaccaatatgtgttgagaatctgctatgtggctggcactgttttaggttggggagtttagcagtgaatgagggcaaaaatgccattctacccttaaagcttacattctgtctagttggagaagagttgataaatgtgaatataaataaatatttaataccatgttgatcatgaagaaaaatcaaataagggaaagggatagagaatgataggatgagggatgctgtttaaaattgaatggtcaacacaagccactctgaggaggtgacatgtgatctgagatctgaagaaggcaaggccatgcaacacaatgatctggaagacagttcaggcaaatgggaagtcccaaggctgagaaccagtttggcttgttgcaagatggcaagaagaccactggccagagcctggtaactaaagagcagatggtgtcaaagaagagagcggagccagatcgcttaggtcttgcaggctgtggaggggagttcagagtttacatgaactggggtggggagccacaggtggattttgaacagagtgacaggatctggtctacttctttaaatcattactctggtttctctgaggagattggactccgcacatgaatggagacagggaggtaaggcactggtccaggcaaaacatgatcggtgcccagtgactcaggatacattttcattaaagagatcataaaacttgcagatggattggatgtgtgagaagaagagatatcgagaatgtctcctgcactttgagcctgagcaactagataagtacgaataccatttatcaaaataggggagcttggggtagaatcattttctgaatcttataatcctccaattgtaccagtgaactcaatttgagaattcatttttgaaagtgaaaaagacttttagtccaagaatctttagaaaatgtcaccacctgttttaggataagccatgtatagcaataattatattctgccacatggagtattccactcttagaattctgaaccagaccatggtcctgatatgatgtaatatttctaagtgttcctttgtaaaaatagtttcaaagactcatgaattataaaatcatgcctcctgtttaggacatgtttataaatatgaataatagaagcttagctcctaactatttcaagaagtacaaggaaaacgtccacagttcagttaaaaagaatgttaaatatcggcctgagatttatactcttgagaaataaatgttacagtagaaatgggaagaaatgtgcttggtctctgagccagtggttcttttatgggaaccagggtcttcaatttccaggcagctacgctgtgctgaacttggactcaaagatttggggacagtaccatcacgtcacctaagcatgatcaagaaaacactcactttggggatacaaacgtcttagccaaaatcagcagtaaatccagcatagagccaaaactatgtaaacagtagtgtaaagatccatatgcagagaaaactgaaggatcactaaattccaaggaaatgtggtttctttttcagtccctactttttacagagaatgctccttttaaatattttagcttctctgatggatctgaattagctatggtcatttttgtagatgaagaagaaacgaaattctaatggcatataaactctagaaagacagggacttttctgtcttcttgctgtatccccagcaattagaactgcacctggcaaatagttggcattcagcaaatctttgttgaataaagaaatgaataaagaaaagcttgaataaattgctgaatttaaaggggaaaaataaattagacaggaatcttttctttctacttgtttttatatcaaaattcattttgtcaggtgaaacctaataaaaatgttggcagaaacttttcttcctcggggtgcaactcttgtctaatacactctttctctggtgtcacagttaacctcttgttgaccattcatgacattgactaagcattaacagatttttatcttaggttcctacagattttatggggtctacatttctcacccattcttcatactctttgctggggagcactgccgacctgaaaagttaaacaaataactacataattgtcaggctggtagccccaaaagatgacttcttttgactgccgtattaattctgtctaatcttctaagatccatgtctaagattctagcctgacttaaacttatatcagttcatttacctttatcagttctgacctcatgctcagggctggccttttttccatcaccatcattttatctgccgtagctattgagtacctatggatgaaaactagtaaagaaataaaaatgagaaatgaagaaggaattgaatgggatacatctgttcccaaactaaggcccttttcagaaagtatttaatgagaaaacagaagcctcacatttttacagcatagaatctagactggattttagaggctactgtcactcagcctgatcagcatgaatctatccttgtatcaagtgttccttgagatctttgaatctaaaaccttttaaaatttgtataagttattctaaagtgagaaaataaatagaatagaatacattcttttaggttgataccaaagtaatcatggtttttgccactactttcaatggcaaaaacttacttttgcatcaagctcatagtagaacattacagagagataaaataaatctttctcatctcgccttttggtgacatcacactttaaaaataggtatgagcaggagcccaaaggaggaatttcagttaggctaatcggcttacaagtagaatgtcttccaggattcaagaacttttggcaaacattagttagcacattcttactaaaaggtaaaaaccttttttttctttgtcaggttttaaatgacacttgaaagggaaactctccaaaccatagccaaaagcaggttaatccaacttcccccagccagctcaagatcaatgaaaaagttagccctgaggagttcaggatgttaattgtgaaacataattccattacatttatggctgtataaactgagcagagctcctcttgaatattatgaggtgttctttgcagtgcgggcaattggttatactggatgctgtaacagatactttattgaaaagaaccacagtttaatcacaagctgttcattaggactgtggttctcaatctttatgggacataaaaatcaactagagcatgcttgtagaaaatgcagatgtctggtccactccccaagcctttctaatcacgttccatgtagagaagactgggaaccaggaaggcaagtgagtaagatacaagtcgtctgtaaaccacacattgagaaatacttcactgaagtctgatttgagcaccttgaagtcaggtctctctctttataaaccttaattccctgcacctaccactgagactggaacctggtagacactcaatgaatatttagtgaattcaaaacaattagcctttatagatgccaggcactgttctaagcactctacacatactagctcatttagtccttataataaaggactattattggccttgacacttgttgaacactctgcctgtacactgtccagagagtcatatggctggcttctttcagctgccacctcctcaggaaaacccttcttgacagcccatctaaagttgcatcgatcctactcccaacccatcacaagagcctgttccttttttttttttttaagcagttacctctatctaaaattattttgtttggtttattgtcttgctcccttcactaaaatacaagctccatgagaacaggaatctcaccaatcttatttgtcactgtctagaagtacagtgcctgaatcacagtagacggtaagaaaatatttgttaaattaatgcatttagcaaatgcataacaaatgaaaagcaaaggagttgtatttgctatgtaatttctcagttctctcagagcttctaaaatttataaggctaaaaagcgacagaaagacttctatcctagaaatatcctcgaaatgatttcctaaactaccctgtcccaagtcatagcataaacatgagaaaaagggaaaactacataagggctaaaatatctgggtagatttttcattctatgattcaatattttgcttgaaatgaactcttaggatgtcagacacatccatgttcaaacataagtaaaaaacacatgccaagatcaaatgtacaagattttcagattaaccaatgtttttttagacacacaatgactctgctttattagtttgaaaagctgtatctacatgacaccaaaagagctagttaaatcaataaaactcaagccagttgtttcaaccgtaaaaagaatagatagaacaattcacttcaaatgatgactgtgccaaactcattgattgtattgctttgtgccaacaaaatcaccctcaggagctgactggctgtaggcttgggagagaacattttaaatgggtttctcctaccgtgtgatcatggttctttgaaaggggccacttggctaaccaaacccatgtagtatttctaccatggacaatcacatcactctcttcctcttctttatatatgtttttgagtctcaggcaaatgagagtaaggcctaggaattgctgctatatgaagcaatttttaccacttctactaaaatgtcagacagtgaatattgtcagtgatgttgttggatagaaaacactcaaaatcaactagagactcaaaaaaaaaaagttttccttgttttattttgagaatgtcttttcactgtgctcatgagggagttggccagacctgggttggcttcattagccatctcagagcacgtgaatacatcatagaaaaatctttccatctttgaggaattcctggtctccaatcacattcatttcagtcagtcattgaggcttagcatgaaacttggaagtaccaaaataaatggagaaaaagaggcagagggaggagtacaaacagtgaggtggctctactaggcaaagaaaagatattttctttgcaaagaacttcagctagaaagaattttgctgccccctctcccatagagaaatattaaatatttagtcagaatattttaaaagatagataggaatttttttattctaaaaatgtccaaggacaatctagtcgagaatgaacataaattctatgtccacaacccaaaccctcaaaaccatctgagttaactcaaagccaggtttagcacattttgcttaccattttctgagctaaacatgatttggattacaaatttctctgacattcatgtgtagacctgagagactgtcatttccttatcagaagcaacaggagaaattctaactatgaagactcacagagatttatcgcctccattcccagcctgacatttggctcagcacagagggtaggcagccaaaaagaagtcctctgctaaggtatgaagggaattggctgcttgcaaagtccagacttgggagtaacacaaacagggcttttacatagccagcaaagcctcgtctgtttgaagtcagatcaattgatttcttgaacatttcaaataagcaaaattctgcagaaaataggagccagatgaatttttaactcaggagttccttggaagagaggtagaaaatagtcaaagaacgtcttctagtttcacatttgctctcccaatagacttactctccagaactatacccacatgacatgtatatagaaacaatgattgaataaacttgaggggtagactttttcttattgaaataaaaaaagaaacactatacgtctgatataaatatataccaatttctcttaaaatactatactgattttgaaggagctccaaaacacttaccatctattgtggacctggcactgtcttggcaatttttgcaaacctcaaatgctagttattattttcatggtacacctaaagaaactgaggtttatggtgattctgtaacttggcagaggacacaatgattgtaaatgaagagactgagattgactcctcaaagcagtccccagctgattctcggagttgaaattgaaatggaaagaatcagatttctaagactaagtttcttctctacttgctattgctagtttgcacctccttgcacatgatacaggaataaattcgcagcctgtgttgaagctgtaactactaggttaggattagtcaggcagttgtgtgtatgtcaggaatgctacctcgccaagcaggagcagcctgtgcacaagtttccccaggaacaataaggggacaaaaatggagtccttccctctctccaatactctctgactttagatatctagatatctctggctttagatatctagagaaaacacgtggaacatgaaaagaagaaaacagacaccctctcatatctagttgttatcttgttaacaccttgttctttgtacttgtgacttttacagaagatgaaatacttcttttctcttaatttcacatatgctgctcagaagcccccaggtttcgtggaatttttattaagaattccagctattccagcaataaattttagacaccacagctttggctgacagagaggcgatacataccatgtttggtacaactgacctcgagggatttttctctctgctttcttctgctttttcttctagtgaaactgtcctgttattggtttttattaatatgatcatattttcccttctcagaaatatcatttttgagataaggaaataataaaaatggtaatagatagtcatcgctggtattttgttggctctcctctgctcttgtatttgaactggctgctctgtttcttgagcactttgataccaacaaagaaaatcacgcacattttagtgtgggctttttaatgtgtatctatgttaatcaggcccactcctaacatttgtcatgctttgggcaaaagtacaaataaaggtcgagataccgtacttaaatacttaaaagttatcagttgagttaacaaactgctaaaaaaaattatgttctatccttctgccttgtcagtatgtcttcatatcaagctgggaggtaaagttcaaattttcagactctttggagttctgaatgcgaagatgcagggagaccagcctgctgctgagttcttttgttcccaccctcaactctgccatggaccacaacagatttcacagccatgcatgtgaacatcccattcacagagcaaaactctatccacagcctccagcaaacagctgttccctagccccacgttggtcctaggcttgcaccccagtgatacagtgtatgtcaagaggcaggaccctgaacaaaagcctgtgcagacactggaaagggtttaagatcatctgcatagagaattccaggatcctgtgcatccagagcatggtcgaggagtgtgggctctgcatggcacaatcctttggcttctcaccccatggcagctgggggagacatggctggaggacagtcagaccaaaggctcctcttggcccaacctgggtagtacttggagttaatgtcccctttgttgtaatgaataagtgggaatcaacctctttaactgcacgcttttcattcataccttctaggtggcagagaaaggtatttcaaaagagatttggaactagaaattcaagatccctagcttcatataaggcaagatatctgcaccttggtatcactaaggattatgtaacttgctctttgaattgcaagtgcagtcatctgatttcctgccccagtttccaatggtccaaagccaatgaagaaacagagcctgttatatattccaaaggagacatcataacaatgaattattatctaacatagaaataactttaattaagaggagagaatacaagctcatatttcattgtcataaatttctttagaagacaaaataagcagaagtcagagaaatgtactctgggagatgagagggaaggatgggttccttgggtttacatttgttctaagtaagataggctgtgcacctcctgcctgtctaaacctctgaatccactcctgcctctaccagtaatgataacaataataataacagttaatacctacatcgcacttacttcatgccggacatcattctaaacactttacatgcatatacttatttaatctgcattaaagtcctatgaggtcggtattattattattatcctcattttctggaaaaggaaaatgaggcacaaaaacatttttggaaaaaaaaaacaaactttccctaaagtcatgtaggtaatagtgttcagagctggggttttaacccaggcagtgtggctctacaatccatgcacccagtaccatgttctgcttcctgaggtggtctaccacccaaggactagccagctcagccaattggtcaccatctactctgccgtgattccccaagtaaccatgcatttgaccccagtagttggaggcctcacctagaaaaactgtctctttggctgacctgagatttcttgctttcacctggggtgatctaccacccaaggactagccagctcagccaattggtcaccatctactccgccaggcttccccaagtaaccatgcatttgactccagtagttggaggcttgacctagaagaactgtttcgttggctgacccaggatttcttgctttctctgtggtaagaacagcctcctcctcctcaggcccagtgactatcacccaccagaggcctggaaaaccatatcacgcccaaattctcttaacacctaactgaactttttatatagaagctttgtgcataagaattttcttattttcttaaggttcacaaaacattagagattgtgccttatttttgtttccaatttacagtagagttctttgcatgtaagaggtatccagagatttcttaataaataaagtcctgctgtattcttcaataactctgagttttaatctggcagctcaatgaatataaagagcagaacaacattagtataaatttcaaattcaattatgagttacatgaatatgaaaagtatttttgtgcccctgtacatatatgtgtgtgcgtgtacaccacgatctattcaatattcaaagttcccattcaaacaagtaatatgttgttagtagttaagtgcttagaacctggaggtagattccctgagctcaaattccagtcctgttacttactgactgtaggatttttgacatgctatttaaaacctctgtgccttgaatgccacatagataagtaagaataattatggtagtagctttcagtcaggcagatttttcttttttttcttttttttcttttttttttttttttgagatggagtctccctctgtcgcccaggccggagtgcagtggcgagatcttggttcatctgcaacctctgcagtcaggcagatttttctaagaattaaataagttaaccaatataggtgcttaaatcaattaatcaatgtaaagtgcttttaacagtgtctggccaatagtaagttctccataaatgttagctgtcatgtcaaaccatcccataattcaagtataaatatggtaccattcaacacataaaatagttgcattttttaagggattgatgaagttgttaaccatactttctctttatggttattaagagaacagttattaataataatagttaacagaaaaaaataacaaagatgatacaacaaggaataacagaatataatacatgctgcattggccaccaagtgtaggcaatgtaacaagttacattatgaaatggctcacagagacatggtcttggctatcaacattatcagctgattcactattcccctctgtcttaaaggaagcttcacccttctcagaataacaggaagcagagacttcaatcttagctccagtctggtaaactgctcaaactcacaccaaccaacagcaagagaatgaacttcacaatccccagccaacatcccatccattcagcaaagggtatctagtagaacagggaatacaatgagaatccacaataatgtcgtgttttgtttacactctacaatgaagccagagggaattatagcaggactgctgtatccaagatgtttcaaagtatatgcaccagtctaatcctttttggaggccaaattccttcttttgtgatgttaacatttgctgtacaaaccctcccaaattcgtccccaggccttcttcaatgtaaagcttggaacacttcttattctacatctagttctagtttacatcattaggatgtggtattttctcaatatcattcacataagtcagggatccctgtaaccagagtaatgctcaattgctcctttaactccttttggtcaaatctatgttcttggcacccaacctaagaatgttaacattttgtggttactagatgtttttaataccattctcttctctaacacaacagatttatcttctgatgccttatcaaaattactaaaattacattccaatttcagaaaagtgtactaaataccattcaatgcaacataaagtggctgtgaccacaggtattttctttcttaggctaatatatagtatttatatatcaaatgttagctcaacaaacccaggagatattacttcttttaaggacaattttgttcatagatatgccgaaggtaccagagctggttggtaaaaagaatattaatatcctattggatcctggaaccacagtaatggcaagaatacaaaggctatatactgtatattagtcaagctaccctttattgagtttctgctaattgtcaggcatcaccatttgttaccaaatacgatccccatagggattattattcccatttttcatgctaagatatggctgtgtattccctaaggttacacagctgatcagtgacaaagccaggatccaaatccaggtggctaggaccctgcagcccataggctctttccaccttgcaggccacctgacagcacatgatccccaatcactgaggcatacttgggaaagaagaactgagacttaacagctcactcaatccatgcacttaaggctgggaagcaaattatcactacaattatctggagaaggaaaagtaaacttttatattctttcctcattaatataatcctttaacaatacttcattttcccctagtgttttctttgagaaagaatataatcaacctcaaggaaaaatgtgaagctattaaaattaatattcaccataataattggacttgactctcagaagccagtaccactgacagttaaagttgatgtcctggccagatgcagtggctcacgcctgtaatcccagcactttgggaggccaaggccagtggatcacctgaggtcaggagttcgagaccagcctgaccaacatggagaaaccccatctctactaaaaatacaaaattagccaagtgtggtggcaggcacctgcaatcccagctactcgggagtctgaggcaggagaatcgcttgaactcatgaggcagaggttgcagtgagccaatatcgtgccattgcactccagcctcagcaacaagagcgaaactctgtcttgaaaaaaaaaaaatgatgtcctctaggggagggggactctcatgatattgcatcacaaatttgtataaagcattaactctttttggttccttcagatatgttgttgcattctaccttaacaataataagtgtagtactgtgacaccttcaaagacatggtgcctcctccaagcctgaaatactctgtggttcatcttttccctatgagtttgatcctacggctcagaaggtgacactttttacaatacaacttcattcattttagagcttgctttctctgaagatttgggatcttacctattttgccaccatttattaatcttagagctcctcagacacaaggttttcatttaatatttaactttggcccagagacatttttaagtttctccagcccaagtcttggaaaagagctaaggaaatgtagccaggagaactctacaacaatgtttttaaaacctcatatgtccagatttaaaactacatacatttatcttttcttcaggaacagcaataactctaagctgacaagatttttattaatattcttggtaacagctggtggacccaacatgtttttttggaaaaagaaagaaacctcaaatacctttcattcacccgtgatgacctggctcagtccttgagaggattaggagcatttctttcataaagtcacatttcattaggatgaatgttttgccgcaacccaactatattgtagcccatcatcaccctttcagttgattaccaaaaagtggatcaacatataaggcatcctgccactgaacctctgagtcttaacatgcagcaaggtatagaggtgtaagatattataaaagacaaagcaaatgccccaaaataaaggagtgagaagtaaagataatactaatgataataaagtcatatttttcagaatgagttagcatgagaaactaatactagaagaattatatcaatttcctgggcctggaacgagaatattgcccattctcctgttgaaggtgatataaggagattgtcatgaacagtaaaatacaatggaagcttgtctgcataaaagtaacatttgattgagatcggtacataactaatcccatttcaaattgaaaataaaatcaaaattggcgacagtaaggcaaattattggcagagttgtaagggcaaagtaaacattctttttctcagaaaggtcctacattcctggataaggggctcccataaactcaaactcttgaaagttaaggaataccgaaagacattttcttttttgcacagttgttcctacaatcaagctccaaatcacctggtctgattttacatgtactagaaggatcacatgggactcaaagtttgtaatctgttgatagcaaataggactgtcagatggtatgggctattgcacactaagagctctcatttatgaatcactagctaccagatacttttcagagtactgtatatggagaaatctcatttacccttaacagcacccaaatgtaatatgtatttctagatatcaccattttacaggtgaagagcatggggtaagtgatttgaccaaggtcacatagaccatgagggtcagagacagcactgaagcttaagggtctcctttagatctcatacacataactttcctgctatgctggttgtcatacacttaccatcttaccagtcagaattctcagtaaacagctttctgagtacctgatagaaaatgttagtacagagccaggttggtgcagtccttggacaccatcctcacccttcctagtgtccccagtctctaactctaccggaggtcttcctccctgagaagctatactctcagaaactctccatctgcccagtccttcattccaactggtaccttctaactgggacaatggtctccattagagaataggtaaaggttaatcttatcaaagttattcacacacatgtgaattctaggttattcatgtgtgtgagtgacttcgtaggataactctatcagagagtacttgcatttcagaagagggttttgttaactcaaatgaatcatacaggaaaggattttgttgttatttggttgcttttgtggtgcctgtggtataaagagcacagcatatggagtcagaaagaagctgaaatcctagctctgtcaatatcaggtatgtaaaattgtgcaaataactcaatattctgaatctctggttcctcatcttatttttaagttgacaactcttcatagtagtgttgtcacaattaaataagatgatgtatgtctggcaccaaacacactgcctggcatatgaagggcatctaataaatgtcagtccttatcctatcctccaaccatttcccgaaggacaagagccatggggctaacccctgacatagactgccatcattttaccagggacattggattgacaaggtttctagttgttgataagtgcagacattctgctatctgcctccttggtagcctgccaactattcatgtgcttcttggaaaaggaaacttttccaaaaggcagggacttcagagggctggtgagacagtgtcctgtcattaaagcttcactggagattggcattcccaatattagcatcatgttgctatatgctataaaggagacaaagtactatcttttctttacccattgtaagtttcactgggacccctgtaacaaaagacagattgggccaggcgcgatggctcacgcctgtaatcccagcactttgggaggccaaggcgggtggatcacgaggtcaggagattgagaccagcctggccaacatggtgaaaccgtgtctctattaaaaatacaaaaattagctgggtgtggtggtacgcacttgcagtcccagctactcaagaggctgaggcaggagaattgcttgaacccgggagatggaggttgcagtgagctgaaatggcgccattgcactccagcctgggcaacagagttagattccatccaaaaaaaaattacaaaagacagattgacaagagaaaatcatacaatttcttgttttgattcaagcttctacagacaaatttatttaatataagttatatgtgacatgggagccttcagaaatgaagacccaaagacccaggacaaacttttttatgaacagttgtgcagaagtatgattagagaacaaaagggtatggtctagtgttaattaactgggggtaaatgggaacttagcaaggcctgtttgttcagattcttcgtggcccctgggtatagggcaggacatgtttggaatgagggttgtatgacctactttcaggacaggtaggtcagagaattcttttcaggctcatttcaggagagaaaggcaggagaaggtcaaagcgtgaccttcttgcttctgaggttttctcaattaccttcaccttaaaatactcagtatgccaaggtatcatattgtagggtagtgtgtccttcacgatatcaatgccaaaatggcctagcctgctttttaaagagattcatctgcattgcctacaaatttatttattcactcaaaaacatgtattcatcaactaccatgtgtcaaatgttgtgctaagcacttaagagtgcagaagtaaatgacagccagtgaattgggtttcctgatagcacaggtgacaataaaagagagaatggaaaagaggtgttctaccaagaggtacacacatatatgcatatacatatatactcacaagacacagaatcatactcaaaggacagtgattaacatccatggtgtcatccattcaatcatttttttccacactttttggagcacctactatttgccagccactggggaaacagcgcggtgataagataggccaggtcccttctcttgcagagtttaaaaacatggcagaggagataggcaatgaataaattaaataagcaggataatttcagctattgagaatgctatgaatgaggccatgtgatagagagtgactgggtttgcgcactgccttcgccagagtggtcaaggaagtcttgtctgaggggacagcatttccccaaaacctgcatgacatgaaaaggggccattcatgtgcagagctggaagaagaccttttgggcagaaaaacagcttgcccaaaggccctggcagaaccaacttggtgaatccaaagaacagagagaaggtcagtgtggccgatgcttattcaacaggtggaaatggaattagggacaggaaagaatcagacaagatagggatctgtaagtcaccaaagggagtctggatgttattcaaagaataattggaaggtattggagggtttttaaaagaatgctgtgacctaatttacatttgttaaataagagagaatattcatataatcccactctaacaaagttaaatacattcatgaaaagactgatgaccatttttgaacaattgcaaattaaaatatactaattctaactagaagtttaattttagcatcactaggttaaatgcaatgactgagaagtcatttgaggatatttcagtgacctggaggtctataatgaccatcatttattaggtgtgaggaaaaaggtgtcttttaaattctggccaagaagataccaggcaacgtaaactccacttgaaattaatgcccctcaagcctaatgtgctttctgcaaaacagtcatggttgagcgggagcctttctagctcatcaagctagttttgtgatgttaattctgtgcagctaagaataagccagcatctcttctgtgttttgctttcatgaaaatcccataatgctaactgtgaagatgctaatggaccaaaagtgtaatactaggcatggctaggttttcaagggatcttagctcaccccctctgtaggatgaggtgtccatatggtgccatatggggacattaagaagccaccttccctcaaaggtcctctgagtgagcctcagactcctggcttccccatcacaaattcctccttgggtgaccagaactctagtaaaagacaactgttttattctgaaggagtaatccaatgataccattgtcagtcatgaataccttccaatgttggtctgttaaagtatccagttactacctagcaaagcccacatgcattttttcttaagtcagaattccaggaagcccaaactgtggctttaagatcacatccataaataaataatagtacatccagacaatggaatattattgagtgctaaaatcaaaggagttatcaagccatgaaaagacatgtaggaatcttaagtgcatattactaaataaagaagctaatctgaaaaagctacatactgtataattctggaaaaggcaaaactatggagacagtaaaaagatggggagttttcagcggttggggagggtgagtagagaagaaagaacaggcagagcacaaaggattcttggagcggtgaaactacccagtacaatacatgtcattatgcatttgtcaaaactcatagaatgtacaacaccaagagtgaacactaatgtaaaatggactttgggtgataatgaggtttcagtgtaggttcatcatttgcaataaatgcaacattgcggagcaggatgttcataatgggggaggttgtgccagtgtgggggtaggaggaatatatgggaactttgtactctcccatatattcctgtaaacctaaaactgctctaaaacataaagtcagtttttagaaattaagtgatacacggcagaatgaaataaaattagatcttattaaaaatggggagcaggtttatgtggaggatctcaaggagtaaccccaagcagcatgatggggatgccaaaggatccagggctcaccaaacaatggccagaactcatagggagtgtgttttgtggcctcctggagaggatattgccagcctgaagatgtctgtactaatgggaacaaataacccatacataacaatgaggcattgatgccatgtagtcttccagtgtcttgaatccagagtagtcctaacgaatgaggcctttggagacagaccagcagattcaaatcctactatgctacctattagctgtgtgatgacctcaggcaagtggtttaacctctttgggccctcatttccttgtcttcaaaatgattataataatagcaactgcctcccagggttactgggattgtattaaatgggataacttatttgtaaagcatctagcgcagtgtcagaacttggtaaaccttcaatcaaaatttgtgatgtgactgaatatagccattattagtagagcgtaatagtgtttgaaaacagtctaagccctcacaaaatatgtgttgtttgaattgttaataataacaagacttcaattaggccatggcagttccagtttaatgcctggcttccacgtcatagtgagcaggctcttctgggtttttaaggggaatggcagccaagagtgagccaaaccctcctctaacctattatcactgcattttagtacgaagtttctcctctgattgtgatctacacctatatgtttcatgagtaggacaagataaaatgaagcctcagctgctattatttctattcatgtagaatctttattgtggggatctttattttaaaactaactttgtattaacttgaggtctttaaaggaaaagctttaggtaaattataatatataattacattttatgtgtttaatccaaaaggtactttaacgaatgctggaaatgtttatttctatatccaatcagaactcaggatcacgcatagcttaccctatgtagcttaccctgtgtttctgtaccactatgcctgcattgataactatgcaggggagagaaatgataggttagaaaatgaatagatgggtaagtagatgattatatatatgtgtgtatatatatatatatatatatatttttttttttttttttttttttttgagaccgagtttcactgtgtcacccaggcgggaatgtagtgatgcaatcttggcccactgcaacctccgcctaccaagttcaagtgattctcctgcctcagcttcctgagtagctgggattacaggcgcccaccaccacgcccagctaatttttgtatttttagtagagatgggggtttgccatgttggccaggctggtctcaaactcccgatctcaggcaatccacctgccttggcctcccaaagtgctgggattacaggcttgagccaccacgcccaacccgatagacatatattttttaaaaaagaattttcttcacaagttatgatgctatttgattgtgttagaagccggaacaagtagaacccagcagtaagaatctagtatggttcctctaaaaaaatccagaatatcattatatgccaaaaaatatgtatatttagtcattcttagcctgactcagagttcttatgaataactcatcatttttttcagtgtgcacctgtataaggccaggtactcatagagatcattcaaaagctatttatgtttgctacgcaatgtcttccatttgcattcttttgcaagtcttgttcagactgatattaaaataagtttgttttttatggatacacatcaaggattggagagcagaagaagcctaatcacatgctgggagatggagagaagccagcatgagattgtaaaaatgttggcaactattacccaagcccaacatgtgtgttgggctgttcatatccagcccaacacacgtgaacaagagtttaatgtttccctgttactcatttcacagagattgaaactgacagagggaaggagtctgagcagtgaactcctcagctaggcaacgcctctagactgtgagtcattccaggacaggagcctcattctccactcattagtgagtctccagcacttgttgtgtctcagcacttgctaagtactaaaaaaggtgatcaatgaattaattaataggtgaaagcatttctctgcattcctctagtcttagacctccaatcttcaagttgaacactagaatgatctggaggttgttgagcaaaccaaagtaaatggccaagcaatgtttattagggaaaatgtatagaggaagaaacagtggtaggtgtgaggatcccttgttatgttggcacattcctggctagggtcatacacaacgatccagcaggcctgaaagacagacaccacaagaggtctcctgccccttggattataaagcatttaaactacatgattagagaagcatcagcccttcccctgatgtgatcagggataaaataccaatatgacacagcagaacctgggctccagtctctcctggccactcatcaatcatggctaaagaaagcaccaggctgtctggtgctctcccatctggcatatgaggttcaagtcttataacttagctatttaacatggtgggctagtggcaggatttgccccatccatgtgcatgtttgggaagcacgagaccctcttttggcaagatatgggaaaagagggctggggtccaagccttgccaatgaccaggattttttgtcttatgcgtaaactgtagccagtttccgtggagctttggtggaggtcagttcctttcctgggaggccaggctgcaggagattcctcttgaatacattaactcttgtctctaagtggtgatgtgatagacacaaattaatcgtgccatgatggccagcctctcttcccagaaactgtgagagaggctttgtgatgaggctaggcttctctagggttcctgttaccttgtacctccatgttactctctacctattcccagccagggcaatccacctatacctcccagactgtcccaggcccaatactcctaaatttcctcagtcccagttccttgggtcctgttctccattatagatcaatcatctgtcatacaaatctttggactgtgggtaagtcacttagcttctgtaggcttctggcttttctgctgcaagatagtcacaaaatctgggtattgaggaaaagatccctccaaaagaggcactaccatctagtggactattttcatttattccttattttgtttgcttacaattctggaactttaatagaaatttcaggcacacagcagacctatggaggaggtattttgagttttaatgccaccctacttatatcacattggcatttccttcttgcttacaagaagttggcccctgaaccagtgaggaagaagatgattttgattcagtgtcccactgtggcctctgaaggacattagtctttactgtgtttcaagttcaaagtgatctgatgagattgtaagcaccagatgggactcagaaacctgggaaagggcaaagaatcagggaaaccacaggtaaaagagaaaaggggaaaaaacagaaagtctgataaggaaaggaagcaggactgggttctttgtattttttttcatgtctgtctttgccttggattgacattgaggcagaagtgacctttaagttgtgcctgaatcctctacagctcctagcatggtagttcaaaaatgtttgttgaatgggataaacaagaaatctaaagtggtgtgtggtcatgagctcaggggaatgggtcatcaacactgccccaaacttcactgaatgtcccctggttagtttcactttgtaagcaaaaaaaattaggaataaatgaaaatgttaccggaaaggggtcccaatccagaccccaagagaggtttcttggatctcacacaagaaagaatttgaggaaaacccataaagtgaaagcaagtttattaagaaagtaaaggaataaaagaatggctactccataggcagtgcagcagcttgggctgcttagctaagaatacttataattgtttcttgattatatgctaaacaaggggtggattcatgagttttctgggaaaggggtaggcaattcccagaactgagggttcctcccctttttagaccgtatagtgtaactttctgaaattgccatggcatttgtaaactcatggtgctcgtgggagtgtcctttatcatgctaatgcattataactagcatgtaacgagcagagaggagggccagagggcactttcatcaccatcttggttttggtggattttggccagcttcttcaccacaacctgttttatcagcaacatctttgtgacctgtatcttgtgccggtctcctatctcatcctgtgactaagaatgccttaacctcctgggaatgcagcccagtaggtctcagccttatttcactcagcccctattcaagatggagttgctctggtttgaatgcctttgagaaaaatactccactagagagtagtgcctgtcttgggggaatcttttcctcaatacccagattctattaccgttttacagcagagaagccagaaacctatagaagctgagtcacagaggctggtggcgagctcaggacagacaccacatttcccagctctcagagttagaactgtgagattcagatggatgaataaaatataaaagatggggaaagtaaaataaattgcagactgcacaaagttgaactggaatcatgacaaccaatccttaatctgtttgctattagggtggagaacaagatggcattctgctcctctggaattcagacacactttctggtatttaaaggaatacaaggaaagctcacacagactgagctgggtctctttatagtgtaaatatctttccaatgggaaaaaaaattactgaaagatggtaagtttgtcttctgacaatatttcccagacgtttttctagtgttaacaaagctctcttggagtgtaactgtttctgaggagtggtaactttaaagcaaaacgaaggaaaatttcaataagaaccaagctgccccaattctccctttatttttaaacagaaccatcaaagggcagctaacggaaatacacttaagtggcattaattcatcctgaagagaactctcaaagagttttattgctacataagggaaagctataaaccagcaggagaggaaagcaaagaaaataagtctggggagacatcttgtgtaagaaagtgagcaggtggtcaataatgtatccttggctggtttccacagcaagagacagaaattcatggcaaggatgtggcccacaaaacagactatcacagagaaaagaattgtggaactttgcaaagtgctgttgaagagttcacatgaatatgaaataataaaataataaaatgctcatctcccctcctttttctcaacacctatcccatttcatgttaatactcgactccaatagcctactgcctgactctgtccagtccctggcatgattaaagacaacaacaacaacaaaaataactaagatggggagggccaacgacagtgagtttttagacctaaaagtaacactggggtcacttagtccaacaatcttggttttacgaacaaggaaatgggtcttagaggttacttttgtagagagagagagaacttcagagctttttccttgcaatgagaagtcttaaattgcatattcagactggagatttagaaaaatgcctctacgatcttgtcattcagctcaagctaagcctaagaaatttatcataggtataaagagaatcttacaagtatcctgaaaatgagtaaaagttatcactgatctcaagaatattttaccatcggtcaacccttcatcattctttacagggcttttaaaataaaaaaaaaaaggcactctttattaatttctaaggaagaatggctattatataggattttccattcttgtaagctggcaggagacctcagcacacaaaatcaggagagtaagaatgaaaacagtaggcatggggaagagtaacatcgatccagtgttcgggtgctctctcagtcatcatactaccaagatggtatttcaacacttagaaaaggggtaggcaggatgaaaatggtgccatttgacaagcatttctcaagactactttctgcacagttatgaactaagtgcaaagagaattcccaaagataaaggtttgattctattcccccagacacttgagtgagctgttacatggcatgtccctccccaaaccagcttctagaatttatcaccaagaattagtttttcaaaataaaatgcattacagatttgcttcacttagggggaaattaaccttttgtatttcaacaaatgcctatggctaaatattgtttgagatttatttggcattttagatgtgaggatactacttttcactatgtataaaaagaagtatatactgaattaagtctgtgttttttcatacacaaaattatgtagaggtctatgggtaaggaatgaattttttagacataactgtttaaatatggtaaacaataaataaatgtttgttgtagcaatattattattcaagtcccccaaaacagcatggaaagataaagctaaaaaagtgattgtaagctgatgattttgctgacctaaaggtttatatatgtattacttgtggattttacttccttcagcagtaaaagatagcctaaattctgtagtcactcccacaagggcaacctgctgctatcacctggcagaaatgtcttcagttctctgaatttcaaagccaaagccctttgcagtcaatacaaagaaggctcctcagagtggccagttttctgggggaaagggagcaggacgagatccagcctttgaactagtgtttccatgtggctaacaggtaggagacgcgccgcactgaagtgggcaagcagatataatatttgttactcacttattagaaactgtctttaccttgcctttcttcagacaaagagaacttcagagatttttccttgcaatgagaagtcttaaattgcatactcagactggggatttagaaaaatgcctccatgatcctgcattcaggtcaagctaagcctaagacctttaacataggtataaatagaatcttacaagcatcctgaaaatgagtaaaagttatcatcgatctcaagaacattgagccaggggacaattggtcagcctagttttcgaaacaggtctggagcagtgtgaaaacaaaaaccattaccttacaaattcttccagatgagactgcagtgaagcaaagtgtcacggaacgtgtgctcaagatcccatctattattaccactgctcctcctccaccaccacccctgttttcttttttttaatttaaataatagctaacacttataaagtgcttagtatctatattagacactgttgtaagcactttattgtattaattcccttaatcttctcaacaacctcataagacagataatgttatcatcagcagcaatttatcaaaaagaaaccaaggcacagacaggttaagtaacttgcttaagattacacagctaataagtgatggaatcaggatttaattcaggcaatttagctcatactttctgctcttgctaacttcatcacaaactctagtcagccagctggactcattcatgcccctcgctacttcctttaggcactgggcttctacaacccccaaaccccatctaattcactcccttcattttacagtttagtaaaggaggccctgaaaggtttacaaggatatcatgatagagaagtttacagagaagactctgagtgtcccatctccagctcagtgccctactcacactctaagtcctaagaaataacatttgtgatccatgtttatcaacgaaattccatatgttcttgtaagttctggtgccttataatgagttttgctcataaaaagaaaagtcctttacactctcagcctccttaactgatatatcctgaagacctggcatctgttacataatactctgccctttcctttctccacttccatttttctttgaaaaatgttcagtggattaactgtgaaaaccttatgatttttcctcccagacaccacatccatctctctatccctcaaaataaattccaccccttaaataaatggaatttccaataccaagatagctgtggtttggttgctctccgagctttgcctttgttcaaagggcaggatgttaccacgcaggctaattatctagatggggctgtggttgaaaagtggtggattttagagactgccctctctgtggctgacgatttatcacaattgagtattttaggctgagccccaggtttagaactaaatgtttttcagtttaaattcattgttgggaacagtcctgtggaatgatttctgctactcctgaaccatgcaccaaggaaagaacaaatccacattttcactgaccaagaaattgtcaagatgttttagttcttttataattcagaaattgtcaggactaaatattgcaactttagtaggattgccattctgactgaatggtgtctttgtgtgtggtggtgggtgagggggtaggaggaaccaattttagaaaacattgattaattatttttattttccaagtgctattgatatgatttaatattctccccatgtaagatagaaacttaactttggcttaacttttaatatcaagtcattcagggttatatgattcaaaataaccttagctaaacaaaacttcaacaattggatccccaagaaatgtactataaaatttatattttatgtaatacattatagttgtgtgctctaaataaacatttttacgatgtccactttaatggattacattagatgaaatttccccacatctctcccttgcaaaaggccttaaaacacttattttacattgtgttggctacacaaactgtactagtgcatgtactagcacatgaacagaaagctgttcatgtaagtaacagtgttctgcagtccttctagagccatactaagaaggaactcaccttgctgtgtatcgccaggtccacggaatggcaaggaccttattcttgcagagccctaccaatgccctactttactgtagagctgcctctggattttagatcttccatttttcttacaaaattgttgttgttcctaaaacatgactatgtcacactcattaaccacgaatttcccctttccaatgtgcatactttgtacttgtcattcttatgactggaaacctacatcaatatttgctgaatgactgcaggaatttttgagcacacacattgtatgaagtttttatcttttatagccactttttaaaggtttctcagtaagcttcacatttgtattcaacctttgaatgtggtaagaaaaaaaaaccatggattattatcattattgtccctaaaccacgtttcttatttcttcctttggtttctggacaagtatagcttatttgaccagaggaatatttaaggggggtagggggtgtacaaactctccatcattattccatcgccaactgtaagaagggagagtgcaatattgaaaagtaactgcaagtatgagattgatctaactttctgacatacaaaggcttgagtacctaagttcctaaaattattattattatttatttatttatgtttgagatggagtctcgctctgttgcccaggatggagtgcagtggcatcatctcagctcactgcaacctccacctcctgggttcaagcaattctcctgcctcagcctcccgaatagctgggattacaggcatgtgccaccatgcccggctaatttttgtatttttagtagagacagggttttgccatgttggcctggctggtctcgaacacctgacctcaggtgatccgcccgcctcagcctctcaaagtgctaggattaccagcgtgagccaccgcacccggcccctgacattatttatttataagtgtggatatgttcttcacattcacaattacaaaaaactttagaagtagaagggacctcaaagtcatatagctaatgttctcattctgcaaatgagggaactaatgcctagtcagaataggtgacttacttgggtccgaactaaaacttaggtattttctgctctgaaagcaatgatgctttcatattaaggaaagaaaaaatatatattctactttagaatttctttttaggggttttcccaagtgttttataaactgtttagcagctgacactattccagttagagaaacaaaaaaaaaattaattgcaaacttcaaatacgtgagctattattttaagaaaaatattctccagatgtttcccaactcctttgagagtggaaaaaaggcaatgaacttacagttcggcagaagagattcggattagatattaggaaatctaatgtgaaatcctacaattggttactagggaatgttgtaaaatctcctctggagaacctttggaatgtggtggttggccactcatttcagaggcattatgtgtgtggttcatttctagcgctgggggcacaacctaattgacttctcaagtttcgttggtcccatgaggtcattatctgcctatagctagtacatggggatgattggctgctcttaattacagaattcagaatttgttagtgaagcatataatttaggctgttttacatttatagccatcccagtagatgtaaatgagcagattgaccaaaaccagtaaatgttcattggatggtcttgcccactgcctccatgtgattgattgaccagaatctgacaggcttatttatttgggctattagtccattttcacactgctataaagaactacctgagactgggtaatttataaagaaaggaggtttaattgactcacagttccacatggctggggaggcctcaagaaacttataatcatgatggaaggagaaggagaagcaagaactttcttcacaaggtagcaggagagagagagcacgtgcgcgcaaggtgcggggtttggggggatctgccaaacacttttaaaccatcagatctcatgagaactcactatcatgagaatagcacagggtaatccactcccatgatccaatcacctctctctaggtccctcccttgacatatggggattacaatttgagatgagatttcggtggggccacagagccaaactatatcaggctccatctcagcatatttaccttgccagtggctttgtgacttaatgaatactttaagcttgtattcctagtcagaaaaccaaagagtaagaaagcctgtctaagagcttgtcttatgtaagagaagaattccttatttcatgcaaaaggagggccttgatatttggaagacaagatggagaaaactgactgtacagttagatggatctgtaccttgtaaaacaaagctggaactttgttagctaatatattggatggcagctcctacacataattaaataacaattttcaatttttgactaggaatgtaacaggaataactgtatacagtcttgaatttcagtaaaataatcaatcatataaatataggatggggatattatcaattagaaactgtaatgtcaaaaaagacctaagaaatggatatgggattaatgatataaagtatttgaagtatagttatgtgtcatttaacaacaggaatatgttctgagagatgcaccattaactgattttgtcattgtacaaacatcatggagtgtacttacacaaacctagatggtaccacttgctacacaccttggctacatggcatagcctattaatcctaagctacaaacttatacagcatgttactgtactgagtgctgtaggcaactgtaacacaatggtaagtatttgtgtatctaaatatatctaaacatagaaaagataatgcattgcaccacagtcattatgatggctaagacctcactaggtgacaggaatttttcagctccattatattctcatgggaccactagtataaatatggtcctttgctgactgaagcatcattatgcacctcatgactacatagtacctgggacttttttccagtaaataaaaaacaatgttgagataatgctgagttacttacctgagggtcatagatcaatatagttagagtcattaatatctcttaatactaatcaattttgcaacaaaggtacatatccttgatcagatgaccctaaggtgggcttatttaaaatgatcttagcacaacaataaaaggtcatgtgcccatcttttatgttatgaccaagttttgggattcattttctcaacatgccctcccttcctccaccactaatagtaaactgcatgtgcacctccatatgtgaatcaagaaaggtaagtctctctaaaagttgtttagataatttaaaaagcaacaaaattgtacaaaatactgagctgctttttaaatgttcccatcattattaatatccaagtcaaaaatatgagggctttctgtcaacaacctctgtaggtagaattttcaatggggagtgaagctgaattaggtatttttgaaagcccctatcaacacactaagacttttgatgatgaggatccatcagtaaatattgagaagtcaaattattcttgtcctcagaaagcttacaatcatgtttagtctaatggacaaaaaacaacaagaaaaaaacataagcttggttacaattacatttgactttgtattaaactttaggagaataacaatgatggagaaggtggggaaggcttcacagaggaggcaggaatagaactggtctggaggaaagaaggtgttatgggctgagttgcatcccccagaatgcatatgttgaacctcaagtacctcagaatttaagcatatttgaaaatagggcctttaaagaggaaattaagttaaaatgaggtcactagggtgaccagtgtggctggtaaataagaagaggcaattaggacacagacacatggaagaaagactgtgtgaagacgcagggaggtgactgccatctacaagccaaggcgagaggctccagcagaatccaactctgccaatatcttgatcttgaacttcaatgtctctagaactgtgagaaaattaatttctattgagccacccagtctgagatactttgttatgacaaccagagaaaactatatggtaggactgaaatctacagagaaataaaaggaaaataattatcttccaggaaaaaagaatatcgtaaataaagaattcaaaatgaggtcaggcatggatgaagaacatacttttgaaatgagtctatattagtgaaaggtaccttcaactaacattgtagtaaacaggactctttccttttttccccatacgttgtcttaagaaagatacatctctcaaccttcacatctctatccaaaatttacttcctcagatgtcattccctaccgttctttccaaaacatcggagctcttccactctgtcattattgaaccctttatcctgctgctatacattgaatgtttatgtccccaaattcatatgttaaaatatgacacccccctccgaaagtgatggtattaggaggtggggcctatgggagataattagatcatgagtgcaaagtcctcatgaacagaattagtgctcatataaaagagactccagagagctcccttgccccttttatcatgtaaggatacagcaaaatggtgtcatctatgaaccagaaagtgggtcttcactagacaaccaatctgctggcaccttgatcttgaacttcccagcctcatgaacactgagaaattgctgttctttataaaccactcaacctatggtattttgctacagcagccctaatgactaagacacctgcattgctttttcaaagcactcaaatctcaaattataaaatgtatttttaacatttatcacctgtctctccacactagactgtgagttcaataagataatacctccactctctaattcaccactgtatctccaatactcagaacatttcctgttctgagtgttcaataggtgttcaataggtatatctaatgaatgaattgccctgagaaatgcaatcaagagagaattttctttgagaggcatggaaaaaccaggaaggcaattctggtgaacactggaagaggattctgcctgactttcccttgctttagggtggcaaatctgagggtcttgagagactacaaatcttgtacaagtaggaggcacagaggaccagcccaggaactgattagagaggcttatacacaccacacacaacagagacacacatacatacacaaagacatgctgtgttagcctatgtgaaagggaaagttggattcaaggcaaggaccaacagattaaatatttaaacattcttctgtatagtaagccaatgaggataaacgtacaaatagaatgctgatgagcatttaaaatatctatcacattattctgttaatatatgtatcacattactctgttatgtacattacaggtcatatgaggaatctgaaattctctgcagccctgctcaaatataggaagccatttagggctgttcaaagtatctaggattggttattcttgacacatgaatgaatgactgccttggttcagctgttctttttctaaatcatttttaacaagtgcattttaatggccattactgttttattcatgttaggttatcattattgcagttaacctcacatttactttgctagtatctttctttgaaaatctttgacattttagttggttttgatttgtctttctggtcacactccattaataataacttaaatctgaatagtcctttttggcttatgaagaattcatattatcatttgtacccctgaacagctctgagggatgggcagagattataattgctattttacaggtaagaaaactgaggcttagtgaagataaaggacttgtccaaggtcataggcatgaagaatggcagagccaaaacttaaataaaagtcttttgacttctttgacagtgcttttgtcatatgacatgacacccatcactaagccagcctggctggcaaagattcaatgttcacacacattagatatgcttatgttcaagaacacaaatacacacacacacacacacccacacccacacacacacacaccagctgtcaaacaaatagaaatcaaagaaaatattaaggagaactcacaatattattgtgtcccacattctcagaaagagaggcatgaaaacccactatcacaatttcttcccagcaaaaattccaaggctccttctttcttgccaggtgtttgtataaagttacccaaatttgatgttcttttgagtgatttgggagaacccccataccactttgaccaccaaaaatatcctcagggacaggagaaaaattagtaggaataagtaaagcagtaaattctaaccagggcccttatataaatattcacgttaaaactgaacaaagtttatttagataaagagccagagaaatggcagaaggcagacctaaagagctggtttacaggacagatatgctgagcctatgagaggaaataattcaactggtattcttccaggcatttcatctccttccagttttccagtatttcattagattgtcctggtttaaagattatgaagtataatccaacatatccactgaattgatggaaggctgaagggccaaacatgctagcttattattaaagacttcaccacaagtctggggttccataattaaattcattcatccccaaaagtagaattaagtaccagcttatacattaccagatattaccacacatttctggtatggattaacactttcagatctctagtaactgtcttacagacattgaatgttagagctagaaaagacttaagggaacatccaagtcatattttaataaatgaagaacttaaagaaatttgtttagatgcacataactagacaaggaataagtactgatctttgagtgaaaaaagcaaaaaatagaagtgtgtatagtatactgcaatttatgtttgaaagggatgtatatgatatgtgcatatccacagactatctgaaaaatatgaggaaaaattgttgcttcaaacataagggattttagatactggagaacagaagtaggaggaaaatttactttttactagatatcctttgctactcaataacagtttacacatctgtcacccccactaagagtacaaactccttgatggtaaggcccaccagccatattatattcatcttagtaatccaaaatgggcctagcaactgtttcttcattttttccagggaaaaaatgatttgttagtgtatttagaaagattgtaaagcttgaattttgtgatagggattcattttaaatattttattaggtgttttattaaccaatccttttgtagcctgtatacactcttggcattaccctggaataggatattgcaaaatcaacgcacattttctaagaagtagaaaactatgatccagaattaagtaaggcaaaagcaaagaaaacaactctcaagaagatggaaattgaattatttacagacagaagtttcttcaaagttttccagaagatacttacattaaaaattgtgagaaatttgccacttctctctctctctctccagcattatgatgacatgtcccttaagattcaaattttcattaagtccctttatacattgtgagcatggagttcgtgtatgcccagcattagaactacagagggcagggagtgggcaggcagaatattgaacagacctaagtgtgtatcacacttgccctctagtgtgcatttgccaacaatgcacttctctgggctgtctggttttaagcctagggcgtttccaaacagaggtcttttcaagctggtttttataaacagataagccccatttatattaattctgtttactgctaatttgtaaagagtgctattaatgggcttagaagcagcgtattcttattaatagttaaacatctccctcttattcatacaactcttgctttgtaaactttctttcacaaaaggacaaagatagactttaatggtccaattaaccaatttctaaactaatgaattcatagtattttaatacaagaaataaaggtgcataattatgatagtgatttttaaaatatttcatactattacatgaagaagcattttctcttcaactcagaagacttctgcaggctttgttcctgtttgctctttacatttacatttatttgtgactacatcaaagcagccctcatctggcagatgaaaaatctctactgtagcataaagcctataaattatcaactgtttccatttagaatataattttggcacttattaacaaagcctaaccaggactgaggtttattctagctcgttttatcattctctgtgcactgcattcgcctcatggtccaagatgtgtggtctgtttccagtaacatatcagcaatccagccagaaggaaggaggaaggggaagacatatccactcctttttaggattcttcctggaaggtacacccatgacaactatacacaattggcaagaatggctgaaatggccctgcctggctgaaatgtcttcattctgggctgctctattcccaggtgaagacgggaaaacagggcaagaaaggcagaatcgatatgggggacaaccagtagtctctcccatagtctatgttcctaccaattgcctttatttgacagattccactattctctattttttgtttgtttgttttctatagaaagtagcattttccttttcatttgacttctatcatgaagttctgatgttaaagactgtttcccttttttttccccattctatctctaaataaactcaagtcacttggccttgcagagtttcaccaagttggtgcattggttcctcccacaggtgatggctgtgctgcctggccctctgcagctgctgggagtgctgcttaccatttccctgagttccatcaggctcattcaggctggtgcctactatgggatcaagccgctgccacctcaaattcctcctcagatgccaccacaaattccacaataccagcccctgggtcagcaagtacctcacatgcctttggccaaagatggccttgccatgggcaaggagatgccccacttgcagtatggcaaagagtatccacacctaccccaatatatgaaggaaattcaaccggcgccaagaatgggcaaggaagccgtacccaagaaaggcaaaggtaacatcatactcccaggctgttataaaacaacagctttccaaatctctaaattatgggatcagagggggaagataaattttagaagctttagttttagaatttgttactggcatttttaaaatgcctactgtgttctaaccatattcttgaaaacttcaagccttaaagacacagataagactaccatttatgttttgctttattattttaactagcatcagatgaaataaaatatattaaatcacaaatagtctatccccttattgtttatttattcaaacattcagcaactatctatagtgagcacctatttgtgtcaggctctgggccagatgctgggagctaaagcagtgaaaaaaaagaaaggtgacaagtcagtcttctgaactaagagagcaatgttgtaaggacctgctgtgttaaaagaaaagtcacaggaaagcattttgcgaactaagtattagacaggtgcaagtgttcttaatactactctaattacatatgtcaatcaatagatcaacagaaggaaactaagagtatagactgcatctagggatgacacctgaaaatctctcctgttgctttcttggcgtatttatttagcaccaacaaaatgcccctcagtgtgacagacacttgacgataaattcatttggtttgtctggagttctcagaaacctagtacttgctgcatcagagcagcaattacctttgaggaagtggagccagtcccactagtccctacaatggcaggaagctccacctctggagaactactggatttggaacttagaggcctagatgcctggatgccagaaatgagagagacctagtcatttgacctttcagagcctatttttcttcatttgtaaaataagattgttgagagaatcagtgacatacatagtaagtaaagtgctgagtaaatgctaaagcaccataggaaattggagttgctacaactgctcattcaacaaatcctcagtaagaacagagtgtgttccaggctctgtgctagacaccagggattcctgattcatctctcctactcttccccagataactcctcaatacagtaactacacaattcgctggttagaaatagcatgcctgaatagtactataatcatatctattcatgtaaagaaagtattcctgactttcttctctttaggagctagtattatacttagaagattatctcagacatttcttttccttcctttattgaatggcttgccttgcctttggcacttcttgtacttactctgatggatcctcatatctcgaaatgagttctctgtttgtattttattctctgacagtagctcagcaaaaagtacaatggtcaggattaaggtgctactagtgacataagtattatgccaagaagatattgggaccatatatttcatttctccatgttatccattagtcccagcagcatgggagatccagagttgtgttcatctgaaaggcacagcatgttcattataacagcacgtgctgtgtatttcaataacaatttgagaaacggtgacacctttcacatctattctctaatcttgtagtgtggctgtattattcttattcttgctgtacagataggcaagcagagatgctgacagcttaagggacccagtcacaatctcacgccaagaccagaaagataagcagagcttcttgttcctaagtcaagctctcgacttcatccatactgtttatcattctaaaatatcttattcatctctcctacttaaaagccagatttgtatatgagaaattatttgttaaattaatgaactaatatttgaggcttaggaaatcccacagcaccttcaagaaattaagcaaatctactaattctaaaggagagatgtggaaagatgttattgaaccacacaaaaaataactctattctttcctatttcacatcatactgtatttaagcataagaggaaatatcttggccataaattattatatttaaaaactttgccaggcacaggaagaaaaatcctgcatattctctcttaaatgtggaatctaaaacaatcgaactcatagaaacccagaggagaatggtggttaccagaggccttggggtggggcaggagggagagaatggagagatgatgatgaaaggtttaaagcctcagttaggcaggagaaataagttgttttttggatatctattgcatagaatagcgagtatagttaataataatgtattacacacttcaaaatcactgaaagagtaaatttcaaatttctcacgagataaaaataagtatttgaagtgatagatatatttagcttgatttaattattccacattgtattcatgaatcatagtatcactttgtaccccataaataaaatacaactataatttggataacaactccaatattgtttaaaatacacacacacacacacacacacagatagaacaaatgagatgaaaatatatatacatgttaagtggttatctctgagtagtgggcttataggcaaatttgatttttctttatacatctttgaatcttccaaattcactataataaacacaccataatatctccaagttttatacttggaaaaatgtttcttcttcattactttttagcttctttacttaaccaatgttgatacaagcagcttcacatatcagttatcaaaaaaatacctcaaatacataaaaaaaaattgtcagcttgatttttctttcttatttatttatttttttccttttggagatggagtttcgctctttcacccaggctggagtgcagtggtgtgatctcagctcactgcaacctctgcctcctgggttcaagtgattctcctgcctcagcctcccaagtagctgggactacaggcatgtgccaccacacccggctaatttttgtatttttagtagagacgcggtttcactgtgttggccaagctggtctcgaactcctgacttcaggtgatgcatctgcctgggcctcccaaagttgtaggattacaggcacgagccaccatgccaggcctgatttttaaggtctagaagatgagcatattattcctagtcttttctcttgataagtattaggcaaatgtgtcagaactaaataatggttgtcagtacttcattgatgtgagagacaatctactaatcaatctctctctctccccccataccccttctctctcttctcttcccagtagaaataccattagccagtttacgaggggaacaaggtccccgtggagagcctggcccaagaggaccacctgggccccctggtttgccaggtcatgggatacctggaattaaaggaaaaccagggccacagggatatccaggagttggaaagccaggtatgcctggaatgccagggaagccaggagccatgggcatgcctggggcaaaaggagaaattggacagaaaggggaaattgggcctatggggatcccaggaccacaaggacctccagggcctcatggacttcctggcattgggaagccaggtgggccagggttaccagggcaaccaggaccaaagggtgatcgaggacccaaaggactaccaggacctcaaggccttcggggtcctaaaggagacaagggcttcgggatgccaggtgcgccaggtgtaaaggggcctccagggatgcacggccctcccggccctgttggactgccaggagtgggcaaaccaggagtgacaggcttccctgggccccagggccccctgggaaagccaggggctccaggagaacctgggccacaaggccctattggggtaccgggggttcaaggacctcctgggatacccggaattggaaagccaggccaggatgggatcccaggccagccaggatttccaggtggcaaaggggagcaaggactgccagggctaccaggacccccaggccttccagggattgggaaaccaggcttcccaggacccaaaggtgaccggggcatgggaggtgttcctggggctcttggaccaagaggggagaaaggaccaataggtgccccaggaatagggggtcctccaggagagccaggcctgcctggaatcccaggtcctatgggccctccaggtgctattggttttcctggacccaaaggagaaggtgggattgtagggccacaggggccaccaggtcccaagggtgagccagggcttcaaggcttcccaggaaagccaggtttccttggtgaagtagggcctcctggcatgaggggtttgccaggtcccatagggcccaagggggaagctgggcaaaaaggtgtaccaggactccctggtgttccagggcttctcggacctaagggagagccaggaatcccaggggatcagggtttacagggccccccaggtatcccagggattgggggccctagtggccccattggaccacctgggattccaggccccaaaggggagccgggcctcccagggccccctgggttccctggtatagggaaacccggagtggcaggacttcatggccccccagggaagcctggtgcccttggtcctcaaggccagcctggccttccaggacccccaggccctccaggacctccaggacccccagctgtgatgccccctacaccaccaccccagggagagtatctgccagatatggggctgggaattgatggcgtgaaacccccccatgcctacggggctaagaaaggcaagaatggagggccagcctatgagatgcctgcatttaccgccgagctaaccgcacctttcccaccggtgggggccccagtgaagtttaacaaactgctgtataacggcagacagaactacaacccgcagacaggcatcttcacctgtgaggtccctggtgtctactactttgcataccacgttcactgcaaggggggcaacgtgtgggttgctctattcaagaacaacgagcccgtgatgtacacgtacgacgagtacaaaaagggcttcctggaccaggcatctgggagtgcagtgctgctgctcaggcccggagaccgggtgttcctccagatgccctcagaacaggctgcaggactgtatgccgggcagtatgtccactcctccttttcaggatatttattgtatcccatgtaaaaacaaaaaaacaaaaaacaaagaaaagaaagagattttatagaagaaaatgacacaccaaaaaatccaaatgaaaaacataattgcttcaaaacacttacacagttggaaagttatatgtaagtgaaaatttggaccattgtgtacaaataaaaactaagatgcatgtttaatactccacacagcagcctgtaattgcgaatgatgggatagagttatgtatcaagtactgacacttggttgtacccactggaatcatattagctgttttatgttatatgcttccacagtaacctgcttattcagatcagtcaaaatatatcagtatgaaagatcatagctaatgaaaggcactcactcatattgtttactttaaaatatttataaatatgccttaaagaaatacaaatgataacaattacataccgtatttacttgcttaatttcctctgtatttgtgtagatactttgacatggaatatatggtggggagacccgtagtgttaccgccccagtgggagggggccctggggaccctggtaatgctttagtcaaagggatatctctcttgtatcagaggctgtgtcttttagtaacaggagtcctcgtcagaattgcgtgtctgttgtctctaaaagaatgggtgaaccaatcggcctttgtgaatttattcagtgccttctctgtaccaagcactgggtaaggcacttttgtggagcattagacagtaaccctcaaggagctagagaaccggatgggagacatgagcagtaattaactcacttgttccccagagtttctatttgttttgattttctttttctgtgacttattttcctattttctttcctccatgtaattttcactatggcccaactaatataaacacctggaaattacaaggaaaaaaaattcttcctctaataactttccaaatttgtggaatatttatttgtaatagcagttatcagttatgcttatatagcattaaaaattctcctcctttgactacacacacaaccacagtgtggttctaatcatggagatatcagtaatttttagtaactgaattttgaggacatttctctgtttagcatgtatgcaaactgatatgtaatctgaggttccaaagtcaatttttttcttttttttttgagatggagtcttactctgtcacccaggctggagtgcagtagcacgatcttggcttactgcaacctctacctcctaggttcaagcaattgtcctgtctcagcctcccgagtactgggactactgtcttgcgccaccatgcctggctaatttttgtatatttagtaaagatgggttttcgccatgttggccaggctggtctcaaactcctggcctcaagtgatgcacctgcctcagccttccaaagtgctgggattacaggcatgagccaccgtgcccggccaaagtcagctttcaaaatccaagccataattggtgaggggggagtttcagaattacatagaaaaattaatatttgaaaaaataattctgaaatttcgaatttaaaaacagatgtgctgcttctgggtgtaggtagtaaaagtataggaaaagaactgtttccttagaagcggactgtggaagggctatgtagaatgtcaaagggcaacaagagcctgtgtttttaatgtcatcctgtactcggcacaaatcaaaggccaatacaagtctgaaaagcagaaataaatatttttccaggtttttgcttgggcacatactaactgctttgggcattctaatctggtctccaaacaccaaagacccatttcgagcctgctattagcctgctgctgactctatcacttggagcaataatgtggggttatggtggtggaatcttgtatatttttgtcaaaaataaaaccatgagttaaggggatagatatagatggaaaaatacacaaataaatacggtatgaaaacacatggaaatgtgtctttgtcaaatctgaatcattattaccatcacaaaaattcttctcttggccaatatctcatttccctatatagtatacaagcaccatttcttctcaatttttaagaagagaaattagtccattaccacaggggttcttgtcactactaattatacaacaatcttttcccaacaaaaagatgtcctccacaacctttgttttcaaagcagacagcatctatgtggccaaatatactttgggttgttcttgaggatactggttttgggctgatgactatggtgggcagcatggatccattgggctccttctgctaaacagccacattgaaatggtttaaaagcaagtcagatcaggtgatttgtaaaattgtatttatctgtacatgtatgggcttttaattcccaccaagaaagagagaaattatctttttagttaaaaccaaatttcacttttcaaaatatcttccaacttatttattggttgtcactcaattgcctatatatatatatatatgtgtgtgtgtgtgtgtgtgcgcgtgagcgcacgtgtgtgtatgcgtgcgcatgtgtgtgtatgtgtattatcagacataggtttctaacttttagatagaagaggagcaacatctatgccaaatactgtgcattctacaatggtgctaatctcagacctaaatgatactccatttaatttaaaaaagagttttaaataattatctatgtgcctgtatttcccttttgagtgctgcacaacatgttaacatattagtgtaaaagcagatgaaacaaccacgtgttctaaagtctagggattgtgctataatccctatttagttcaaaattaaccagaattcttccatgtgaaatggaccaaactcatattattgttatgtaaatacagagttttaatgcagtatgacatcccacaggggaaaagaatgtctgtagtgggtgactgttatcaaatattttatagaatacaatgaacggtgaacagactggtaacttgtttgagttcccatgacagatttgagacttgtcaatagcaaatcatttttgtatttaaatttttgtactgatttgaaaaacatcattaaatatctttaaaagtatgtttctcatcttgttcgtatcattcagttgacactgaacctcacaagtatttttaaattcgtactctcatgaattagctgctgaaatagagacctaaaataagcatagcttatacagaacaatttattcctctttgacttaagagctcctaggataagcagtctaggactcacatggtaattccaatcacagccccaggctccttccatcttattgctcttctacatcaagggtgttgccctcatctccatggtccaggatactaaccatcagtcacattctatccccggggaggatgaacaaagcaggaaggacaggacatgctttttgtcttaaaggactcaacctagcagctgcttggatcactgtctcccacatcccgtggctccaaatttagtcacgtgaccacaagaagctgtaaggaagtgtgggaaattgaatagtctatgtaaccatatgcccagctaaaaatcaggggttctagtagtatgggagaagagagaatcaatattagggaataattagctgctgcatcttccacttccatcaaaaaagaaaaaatggccacggacttctcttttcccacaagagaccaatcttcaaatactccattctatttcactctgccacaaaaaagccaaatattttgaggggagatagtggtgagtggaggtaaagggaagaagcagacccgtttgaagagcctgagggtcttagtaagaccctgagaagaaagaattattttgtgatgacttaccaatcccagaatgatcataacttaccatgtctaaaatattataaagggattattcaaatcattcaataagcaagatgtaccaccagtctatggctggttaacttacttgtttaaaccatcaggctggaaacgcaagactacaacttccattcccatacagcccagttggtttggttttatttcacagccaaatacacttccctcacagtcatcttacaggcatagagtgttgtcacaaaagtgaatggaagaacagatagaggaaatggaggcaaggaagaataaatggttagaatttggaattctgaagagcagggcaaatctatcattactgttactaaataaaggaaatcaaaatacatcttacaatgggtgtatagtacccctttatattaaaacagaacacaaataaggtagcccctacttggtgcctgatactactaagcaatgtgaggcatacaaaaggagagaaaacatctcttctccttaaaaaattatcttctgggccaggcgtggtggctcacacctataatcccagcactttgggaggctgaggtgggcagatcacgaggtcaagagatcgagaccatcctggccaacctggtgaaaccccaaccccatctctactaaaaatacaaaaattagctgggtgtggtggtgcgcacctgtagtcccagttactcaggaggctgaggcaggagaatcgcttgaacccaggaggcagaggttgcagtgagccaagatggatccactgcactccagcctggcgacagagcaagactctgtaaaaaaaaaaaaaaaaaaaaagtatcttctggttggaggatatcaagatgtttgttaaacagaaaattgatgtccaagagcagaacctgcacagagcagggtggtgtgatgttgactggattcatacgtgctaaagaaattcagaaagagaaagacagttccatgctgccctcttccagggaataccttctctgacctgtctgctgggtaaactcctcacccttcagggtcattttctcccccacatcaccaacctgcctcatactttcctctgtcccttcactttgtctgctttgtaactgaacccttgtctttcctattatagtataagcttcttgtgagcaggctagttctttcattttttcatccacagcccatcatagagtagtggtctaataccaggatgaggaaagaatgaatctctgaagaatgctgtggggtaaggggtgggggcagggagtcctaaactggatgtgaggttagactgaatggcaggaaactctcttctagctcaggtattcaagattgtgtaaaagctaactatgcgataaaaatttcaactgctttttggagagctgacttttaaagaaatgtagaatttggatggagggatcatgaaagtatcccaagagaaacagcttctcctcctctaatcaagaggagaaaaactaggcgtgtacgtgtatgtgtcttgagtggcaggaggaaaggaagttgagctcagggaaatggtctgactagatcagagcatctacccaaggactagtaaaggaaattaatttagtaactaaaggaaggtcaagtgacacagtgctttacatacaaggaagagacatttctatttttaatatgcaataagatactataggtccttaagtgggaaaatggcataaaataggtattttggaaaaattatttcaacgatgctatgaagctgacactgaagaaggcaggttatacgtagtaaaaccaattaaaagaccaggccatcttttatgcagaagtgaaatgttgggtgatggtgaaggaccctaaatagaccttgcaagtaaggaggtagaagcaggtaggttcaggtgtcaaggtttaagggctgcatgacaatgaagctgtttcagggcctcagaactgggatgatgaagaatggaaaaactgaagagctagctgaaagactgaattggacttggggacaatactagatggccttataagacagaaggaagcttggccccaaaagaaggaaacttggccccaaatggcagtttcctcccattggcaaacttggaaaacagggatggtgccatcaacagaaatgggtaggccattagtagaacccatgccaggcaggatacaggggaagacaccagtttgtttatagactcgttgaatctgacctgatggtgggttttttagtttgctagggctaccattaacaaagtgtcacagactgggtaggcttaaataacacactttatcacagtcctggggctagaagttcaagaccaaggtgtcagcagggttggtttcttctgaggcctctctccttggctcacagatggccatgatttatctatgtcttcacatgatcttccctctatctgtgtccttatctctgctttttataaagacaccagtcatactggattagggtttacctttgtgacctcaacttaattgcttaaaggccctatttccatatatgtcacattctgaggtcctgaggtcctgcagattaggacttcaacatatgcattttgggggggactcaactcagtgcgtaagagtggaagatgcctgtgctccaaagatgtgtttttggcaggaagatgaagggtagaactgtgagcatgggtagaggcctcatggcctcttgtaataagagggagaaaaaagactgaccagtaattagtaacaccatttgcagaacaaaataaattgctttacaatttcctcctttatttactgcaggaagttagtttaacacatcatttcatcaaagatacagcaaaggtaaacatcatccaaatacatatggaattacaaggaattccaaacatacagaggcaacatagagttgaaactagtcatgtcttattatattttgggagcttctctccttaatggttcttttgaccattaaaatgcaaacgttcatgctcattccatatcctgaataacaaaaatatatctgaagtagccttaggattatctttaacggagagttgcacagaagtttagatatttcctttcattttacagaaccaatacttgtgtccagacaaattttattctcaaacaagttattctttataagtcaaaatcatctaatgagttttattatgaaaaaaaaatttttttgctaattcctgaggatacatgtaatggaatttaaatcaaagtggggcacatcatctcacttttacaagttattcagaagcttcttgtgtgtgttactgaaacactggcccatctaatcaaattttccttagacatatccagaatctttccagagacttttttctttgctatcttactgtaagtaaaaatagatttgtattagaatcaaagacacttctaaattaaagtttataaatcttgaggacatctatatttcacatgccttattaattttgtaataagcctaaaaattaattttgtaatgagcacagccaagtcagttctcatctgacaagtgagtggctggcagcaattttcacatctgctcttcattcatgggatgagagacacaggggaaaagctgatggaacactgacgactctccacttgcctactactaataatagtcatctttcctcagcaaagatgatggtgtccttgctacttattctgccaaacaagagtcaaaataaaaaaaaaatgttaggagagggttctagggtcaaaccaaaagagaacaaatctcagtgcctctgtttaccagctgtgataccttgagccaattacttaacctctttaaactttagtttttgcacttataagatagtaaatgataacagtgagtatcttctacagtagttggaaagggaggtgaagtagtagggtgtggtatggagggtgtattagtccattctctcactgctacaaagaaatacctgtgattgggtaatttattatttatttatttatttttgagacagggtcttgctctgttgccctggctgaagtacagtggtgcaattataactcactgcagcctcgaactcctgagctcaagcaatcctcctgcctcagcctcccaagtagctgggactacaggcacacaccaccacacctggctagagactggataatttataaagaaaagtttaattggctcacagttccacaggctgtacaggaagcatggcagcatctgcttctgaggaggcctcaggaagcttttattcacagtggaaggcaaagtcagagcaggcatcttctcatggctggagcaggaggaagagagaaaggggggaggtgctacacactttaaaacaaccccatctcatgagaactcactcactatcatgagaaccactgcatggggacagtgctaaatcatttatgaaaaactgcctccatgatccaatcacctcccatgccccacctcccacattagtgctacattttgacataagatttgggtggggacacagatccgaatcctatcattccactcttggcccctcccaaatctcatgtccttctcacactgcaaaatccaatcatgccttcccaacagccccccaaagtcttaactcattccaacgttaactcgaaagtctaaagtccaaagtctcatctgagacaaagctagccccttccatctatgagcctataaaataaaaaacaagttagttacttccaagatacaatggaggtataggcattgggtaaatactcccattccaaaagggagaaattggccaaaacaattgggctagaggccccatgcaagtctgaaactcagtagggcagtcctgaaatcttaaagatccaaaacaatctcctttgactccatgtctcacatccagggcacactgattcaacggatgggctcccaagatcttgggcagttccacccctacagctttgcagggttcagctcccagagctgctctcaaaggctgatgttgagtgcttgtagctcttccaggcaacaggtgcaagctgttagtgtatctaccattccagagtcttgaggaaggtggccctcttctcacagcttcactaggcaacactccagtggagactctgtgtgggagctacagtcccacgtttcccctctgcaatgccctggtaggggttctccatgagggctctgccccttcagcaggctactgtctggacatccaggcttttccacacatcctctgaaatccaggtggaggttcccaagcctcaactcttgcactctgcatacccacaggcttaacagcatgtggaaaccaccaaggcttatggtttgcaccttctgaagcagtggcccaagctgtacctgggcccctttgagccacagctggagcgagaatggctgggatgcagggagcagtgtcccaagcctgcacagggtagtcaggctctaagtgaggcccacaaaaccattctgtcctcccaggcctccaggcctgtgatgggaggggctgccacaaagatctctgaaatgccttggaggcatttcccccattgtcatggctatcagcatgtgccttccttttagctatacaaatttctgcagccagtctgaactgctccccggaaaatgggcttttcttctctaccacatgactagtttgcaaatttttcaaacgtttatgttttgcttcccctttaaacgtaagttctagttttatgtcctttctttgctcatacattattagcataggttgttagaagcagccaggccacatcttcaacacattggtgcttagaaatttcttctgccagataccccaaatcatcactctcaagttcaaagttccatagattcctagggcaggggtacaatgccaccaggttctttgctaacacataacaaaagtaacctttgctccagttcccaataagttcctcactttcatctgagatctcattaccctggacctcattgtccatatcattaacagcattttggtcataacagtttaacaagtctctgagaatttccaaattttccctcatcttcctgtcttcttctgagcccaccaaattgttcaaacctctgcctgttacccagttccaaagctgatttcacattttcaggtatctttatagcaatgccctactcttcagtatcaattttctgaattagtctgttcttgcactgctatcaagaaatacctgagactgggtaatctacaaagtaaagagatttaattgactcacagttctgcaggctgtacaggaagcactggggcattagattctggggaggcctcagggagcttccagaggggtaacaactgctaccatttagtgagtgccaaccatgtgccacaaactgctttaaatgtttttatgtattgacttagttactcctcataataactctattattagctccattttacagctaaagaaatggaggcactgggcatggtggctcacactggtaatcccagcattttgggaggcgaaggcacaaggatgacttgagccccagagttcaagaccagcctgggtaacatagtaagaccctgtctctacaaaaaatatttaaaaattagccagtgtggtggtgtgcacctgtagtaccagctacttgggaggctggggaggaaggatcccttgagcctaggagttcaaaccttcagtgagctatgactgtgcctgcactccagcctaggcaacagagtgagaccctgggggaaaaaaaaagaaagaaagaaaggaagagagaaagacagaaagaaagagagagaaaagacaagacaagaagcagagacatagtaacttgtccaagatctaataaatgacaatgccatgattttaatgcagatatctggcttcacagtccatgctctcaggtattatgccagatcgcctcctcaaggaaggagacaaaagttcttagctatctaagaagcaaacaactgccagtgagggttcaggagatgacagggctctctgttgtttcttgattattgtgcttaccagagacaacagatatagtcagctacaaaaagactatgacagatgtcatggtgacattcccatcccttagaatatataaaggcagcaggttttgaaaaggaaagggacctacctcatacttattaggaagactactatcaaaacaaacaaaaaccagataataacaagtattggcaaggatgtggagaaactggaacccttgtgcactgcttggggggaatgtgaaactggaccactgtgaaaaacagtatggtggtttctcaaaaaattaaaaatagagttaccatatgatcaagcatttccacttctggtatatacccaaaagaattgaaagcatgaactcaaacatacatgtgtatattcatgttcatagcagcattattcacaatatctaaaaggtggaattaacccaagaggccactaatggatgaatgaataaacaaaatgtggcctataatgcaatggactattattcagccttaaaaaggaagaatattttgacacatgctataacatggatgaaccttgaggacattatgccagtcacaaaataacaaatattgtatgactgtacttatatgcagtacctagagtagtcaaattcatagaggtagcaagcagaatggtggttgccagtggctcgagtgaggggggtttttgtataatgggcacagagtttcagttttgcaagataaaaagagttctgaggatgaatggtggtgatggttgcacaacaatgtgaatgtacgtaatgccactgaactaaactgtacttaatatacttaaaaatggttaagataataaattttatattatgtatattttacaatttcaaaaaatgatgttaaaaagtaaaactaaagggtaaactatttatcaataggaataaaccataggaggcaattggaaatgacttccagcagcctcccttacctccaagttcactgcacttctcaccaataatgcatcaggggcctaagcagcaacattttggtggtccaaaaaccacaaatcccagctctcccaggaacacttctgcagaccattatggaaactgccactttctgtgcctcctctacttcagtggatgttaccttctagagaccttaagacctggctgctggacgcagatgctctgccttcacccattaacttcaaagtacaaacccaaatgactggatttccttttcctcaggcccaaatatgcaatctgcatgctaattctcttattacaaaagcaaagttaacaatcaggtttttcttcccctaaatgagaggatctttacagagtccatacatactgaagacataagattagaaaaaggaagctttaattcagccacctgacctcagcaggccctgtcaggagaaggaaggaaaatccactgccaatctaggcagggaccaacaaaggaatacggttttggcagcttgcaggtccctaaggaacaaggtctccctctcgtggccatgatagaaacagcagttcaagaagcaggtttcagtcattttcttcttacaggaattctgttatgtcagacattcagaaaggtcatagtgggaatggctagcctctgctccatgatgtcttggaccacagcttgggatcaatcaacagctggtgactggaatcacctgggggtatctttatttataggtctggctgtggatgctgtcagcagggaccttagctgagctgtggaccagaatagctacacgtgttctttccacagggtttctctgtgtgggctactttgagctttctcagagtgatgcctgggttccaagtgagcatcccaagggagcaaggtggaaatgcacagaattttagggatctagcctcagaagtcaccgaatatcatttctaccatgttctcttggttgacatgataaagttctgccaaggttcaaggaaagggaacacagatcccaccactcaatgggagaactgtcaaggtcagattacaagaagagtaggtgagatggaggatattggtggccatctttgaaaaatacaatctaccgcattgtccacctggttggtcaatgcttcacttgtagtggatactctctggtggacacacacatgtgccacaaagacacacacactttgtgctcactcctttaggtccctccacatgcctcttcctcaggtctctttattattgaacttcacatattctatcttagagacctttcacccaatcaaccataccattcactgttgctcaaggccctacatttacactgacctcagactattttctccattcaaaggagatgaatgcatgtactgaagctctgccaaccaggattctgttcacctctgtcctttaaggatcctccctgagtggaaccgcagtgtagtagcaatccattttcagttctaccaacataccaagcttaaccagctttgagcattttccaacattatcagctggtcatagagaataacccagaggacataggtgtgagctgaggaacacaaaaggcaaggagctctgagccatctgttcatgtatcttgtgacttttggacttgcttacatgtgctcgcatgtataccatttctgttgttcagtggattgttactgtgagcacccaaccttacaagagccaattcctgaagggcagttctggtcatatagtcatttgatattccatagtcaagtgcctgtttctgctaggactctacattttgcccacagctgcttttcaaatggtttggctgtagaaggcaaagctgtactagaaaatccttggagcaggcaccgtgattctctctttaggatctgccagagattccatccagcatcattatctatcactcagcacctttggatctgccatgtcattatggcctgagtggcagggcagcttgtgtcgtagccaagacttgctgctgagccctcccttctcttgaccctattcaaaaatggcagccttttgagtcacctgataaatgagttagaacactatttccaaatgtggcataggctatctgcacaaaatactgtttctcttaggggaagatgagagatacaaaaaattttcctttacattgaaggggattcccaggcatgcttcagatcaccaaactcctaaaaatataaccaacattgcagttccctgaacatttgtaatttctctctcaccctttggcatgcatgtattttactagggcatccagaatacttgccattacctgctctctagatccaattaacactatgtcatcaatacaatggatcaatgttttgttttgagaaaaaaacagagtctttttgaactatatgatgatggagaacaggagagttaaccagccctgagaatgttcacagcaaaatatccacagccttcagttaatctgaactcaatctgcccaagtgaatgcaaattgcttttgatcttccttcctcacagagattgaactgaacatacctgccagatcaaaatcacatatgaagtgctagcggctatgttaattgattcaaccaaaaatacattatctgttacagcttctctgattagggataccatttgattcagtttacagtagtctactattatttgccatggtccacctggcttcgaagggatcatactggttaactgaactccttagtcaccattagtctttcaagttggcattaatctctgcaattccactggactgaggtatggcctatgatttattatctttgccaaggagtaagggagagggataaagtttcagggacttccactaggcccttcctaccataatgattcatatttcattggtcaaaggaccagtgtaatggttctattagctgctatcataattatggacacagcaactggggaatgaccataagtttatggacccatgacagccagtgtgaaacagattagaaaaagtatcctatcacccagccactgcatgccccattctaacaggggtttatggtgcaccttagactccctgatatcgatgtagttcaccctgtatctgacagcccttgaaagaactaggaattcctaatttctccggtatggttcctctgaaaaaatggccacaggttcctgtggaaaaagtatgggtaaatactatatatatttgtggtgttgcagggggtcttcctcagggggatccagattctctttaattgatgagctctgggtttccaaactggctcacatctggaaaccggtccagagatcatactattccattttggcagttgacatgtaccttctgttcaccagctcaagttcattgttattgctgttatataattcaatcaacactttcattagctttctatctatcttgcccctaggaatatcatagtctatggaacaccacagataccctgaatatcaaggacctgtgactgtaattacatccattttccttctgatgattctgcactgccaaatgcctttgctattctaggattctatggtacctattgatactagagcatctcctgctgtcattcctagcctgcacaggacagtcgccattaagactctcagccaagttggtactcaatcactactgcaatcttattgcgttagtgaaaagattgtcctctggccctcccagggaacacagtgagctgacaggttctttggtcttaaaaaaacaaatacattctaaaaaaaagtccagggctctgagccttctgactctttccttaataatctgccaaggcagttctgacgtctccatctcatttaccatagatcaccattgtgtctaagcttcaagttacctcacaaaattgttggttcttgctgacatagagaaaacctatagcttttctcatgaataagtaattttctcctctagtaggtactatactttccactctgtctatgccaagatttaaccctagttcttggtgaagaggaagtttagagaggtgaaagcagatcctaagacaatgagacaacaaaaacaacatgtttgtgaggtgctcagagaaggaagctatcagcatgatggaaatggtcaatcacagctgcagagcagctcagacacgggtcaaaggaaaatggagcaggttatcaacagtattgcttcaaagtcataatgaaagaagaggacggtatgaaaaaaaccaggaggattttaatagaatccaaatctttacatatacatacaaatctttccaggaaattccaccaagcaaccagaattgagaaccattgtcctaaattattgggtttcaaagttcactgagaaaataaaagtcacaagataggaatggcttcatcgtcctgccatctcaggaatcttcttaaaatgaagtgaccctgctcctatcagatggcatctcctccatgtggctctgaatctccctctgcttcccctttgcaagaacttgactcttgcaattatccccttttccttgactctcagcagtgcacccttgtcttgggactactcttctttcttgattcgaagggatcatatttgtgtcgctctcctcctccctctggctattttctcctgggctctttggcctctcctcctacacctgacatctaaacagtggaggcccgggaactcttttctgctctctacactgtctccctaagtaatctcatctagttccacttctcttcatttccatttctactatcaaattccaagacactgctatctagctttgatgactacaagagcctccaacctagtctttctgtttgtactattactagacatcatccagcttaaaaaacataagcagatctcacagcctaaaaattccccaatggtttcctgcttgaaatccttatgattgctgagaagctctttcaggtatggcccccatctacttctccatcatcatctcttgccacggtcctccactaaccctcccacctaggtcacaattgctatgtagttcctttatagcacttctatcttttagctgaatttatcatttttatctgaatttatttattcatttagttgtcttttgtctattttgtccttattgtttatggtctgttttgtccttgtctaaggcctacctcatcattttaccccctaaactgttccctcctcgttttactagtcccgtctaagatttttttttttttttagtttttaagatttgaacctttagatttttttgacttctgttttcctcaccatcctatttccaaaatattagcacaaattgatggtaatgctcctcattttggttcttcctttttttctatactattgttaccctagtgcagtgactgtgggttattttggggacacagaccacattgggagtgtatgaaggtcatggggcagatgggaaatcacttactagtaactcagcaagttacttaattttctgtgccttagtttcaccatctataaaatggaaagaaaaacagtataaacctggagcagatgctttttatgccccttagctcattttgaaattggctcagccatggaggaaagttctgggcacactgtcattatcccacctcaagtgagctgaggtatactgctctactcttctgcctcagggctttctccaacagcagcacagcctgggaatatctgccaattcataaccctggcaacaaccctcactcaatggtagatgacagtcagtggataagtgtcctagccttctgtccttttgaagatgctatgttgtctggggtgtataccctggggttcatcgttgtgcaccagaaaaatttaggacctgggcacacacgaggagtttaggagcgtacatttaacaggcagaagagaagaaaaagaggtctcttctttatatagagaaaggggtctccaagcagaaaagactggctggtggcggaaagtgccgaattttctagtccagtttgaggaggtggtgtctgatttacatagggctcacagattggttcgaccaggtatgatgttttcatagcacacggggaaggctggtcactccaccctaatcttattatgcaaatggactttccagttgatcagtgccatcttgcctgctccttgcagtacacgtggctggcagagaagggaaaacggaggcgccatttgaacatgtctagtccttagttcctgccagcattcattcgtgtaagctcccagcttgcaggctgctctttgttagaaaattatttggggctgcttttcattaaaaagaaaagccttactgaggactcccatacccttactatgtgtctaagtaatttcttcttaactcctgtatcactttgtgaggctaattctggggtatatcctatttttttcagagggtcttcaagaggataaagagccagtcattgtctacatcaaaaccagtttaatatcaatcctccttctttgtctcattctctctgcctttattcctgcatcctggtatcacctcccaaataaactatttgcacccaagcctttgtcacaggctctgctttgaggggaaccctaagtaggcagttgattttatcagttggggtcctaccatgcaaaagatgacccatttaagctggaaaactgaaaataatttagtaaggggagtatttctgaacatgaggtcaggttagggaaatgaaacgtggtgtagaaccccaggactagtaatggtggggagcagttaccactcctaagtctgaagagacaaaggcaagttactagactcagaagaaagaattgaggagagctgctgaactagagctgtggccttcagtaaagggaccagcgtcaggactcaagtgagacaagcattctcaggtcggtgtcagtgtcagcctgagagtgactgcctccttaaatctggtatcctaggtctctgcttgcctcaccctagtcccagcacagtatctcatggagttatgattaaatgaattaagatataagaggcatagagaggtacatacaacatgctattgttgatattgttactaccattattgtctacatgatgcaaaagtttgaatgcattatgatggttcctgaagtacacttataggctgggcttattgactaagaacctctgcactgattaagaccttttcattgtgtggtgagcattcacgaaacagccttcaaactttatcgctctcttactaattcagtttttgccaacctttcacatcatggcatccatagaaaatggtaatatctgtacaacactagagtgaaaagatgatgataccctcaacctgaggcaactgccccaaggtcactgcttcctccaaagactgcaggggtcagtcttcagcccacccatgccaggtgggaagctctgctcaaatccattattcatcctgcacagtaataccaatttagctttcctaaaacaatacttccatcatgtcctttgcctctaataacaacgacaaaaatccagaattcttggtctgatactcaagattaaggcatggagttggaagagaccacaggaatcatgaaattgctcccctttattttacagactcacaaagaaatgcccagcaaagtttaataacttattcaaagcaacattgcaatctttctgccaaggaactatcatttaccctatccatttttgccgacagacatccattgtcaagtgctacctcccagttcgccccattgggaaatgaatgcttcctcctttaaactctaataatactcattcagatactgaacagtaagagggagcagaaaaagacctaatagttatttcagcctgagcttccctgtgttagatgatatgatcagatactggagagtacggttttacaatacactgatttataaaccaggatgcctattcactaataaccaattcactaataacagaacaaacagaacagaaatggatgctacaacttaggttggctattcaatataatctggggtcagtaaacttttttctgtaaagttagagcaaatatatgagggaatagtaataaatagtaaatatatgagggctacagtctctgctgcatatttttctttacgtttttgttgttgtcgttgttgttttgttctgtttcttacaatgctttaaaaatgtaaaaaatggctggacacagtggcttaggcctctaataccaacactttggcaggctggagtgggaggactgcttgaagccaggtgttaaagaccagcctgggcagcaaaatgagacgccatatctacaaaaaacaaaaacaacaacaaaataaccaagaatggtggcatgtgcctgtagtcccagctactcgggaggctgaggcgaggtggaatataatgtaagaccattcatagttcatggtacaaaacaggtatcaattcccattaatgcatagacactccataatttagtattgccagacttcttttttttttttttttttttttttttgagaccgagtttcgcttttgtcaaccaggctggagtgtaatggcaccatctcggctcaccgcaacctccacttcccgggtttaagcaattcgcctacctcagactctcaagtagctggaattacaggcgcctgccaccatgcccggctaatttttgtatttttagtagagatgggtttcgccattttggccaggctggtctggaattcttgacctcaggtgattcacccacctcggcctcccaaagcgttgggattacaggcttgagccaccgcgcccggcccatacttcttaattttgtgatttattgcctgaaaaacggtctcgctgtggtgttttttttgtatttcccagattaataatcagactgaattcttttcatgtttattagccatagcaactcctcttccacactggcatttcttatctttttcaaaaatctattaatcacgaaaatctcgtcatctacatttcttcacaaaagccatattacttttgatctttatagattattttacatttgccatatttatacataatatcttcccttttggggcatttagagtgtgcggacaaagtctaggcagtaatgcatttataaaacatctatgagttgggtgcacacggggtaattttccacatatggctaatcctagcctcatcagattaagtttccctgtcttgtcatttccgaggatgtatcctattagaagtctagccctttattcctacaaattgaatttccactactgtaggctaacatctgaatggactcatcttactattccatgcatagtaccaggcacgttgcgtgcttttactacattttgtataatttttacgtctgtgtttgatgtcctgaaaaataccgtccacaattacttcacagctagccccagcacttggcgcccagcgggttttcctagtccctccctgccaaatcacgttgggactgagacaagaggcactgcgggtctcttacctatagttacgaagcaatggactcccttattacttcgtttcccaaatagggggtgggacacacaaccgagggagtatgaggaaaacaacttgcgggtcttcgagccacttgcgtctttctgtgggcgagcctttccaggccaattacattttctttactcatattgcataaatagcagaactacatttaccacaaaggcccgacattcatggtcatggatccttgcgcatgttttctaagagcaaactgtacaaacacataaactctgaaacactgacgcacaagcgaaaacacacgcacatgtttgggtcttctcccgctgcgcaagttctttgaaactgagcggagaaaaatcgtcttcacatggtgtctcacactttcgacacaatcttatcgggaaacgtaacacgtaaacaaaattttttaaaatgcattatcaaaaacgatgacaatccctttcgtcttatgttcctttttgtctttaagctttggggggatttatgttgcgtttccaaactgcttctgcctgtcggcgcctgtgtggaaactgcgacgagtctgggagcggctgccggagaggcggggcagaggtgtgacgtcatcgccgcggggcggaggcgacagtgtctagcgggagctccgcgtgtagctacgccggccgcctggctttgagacaacgtgattctccgcagctggtcgcctacccgtgatgttctgcccacgtcgagacctgagctgaaatggcagacgatctcggagacgagtggtgggagaaccagccgactggagcaggcagcagcccaggtacccactctgtgcccgcgctcctacggggcctctcccggagcccttccgtgcgcctcagccctggtcgcttctggcgatcgcggtgtttgcccagcaggggtgtgcaccgccttgggagcgcgcaagcatctcggggaaaatggtgcaagagattctttaacacgtgaaacagacagctgtgacattaactcagatctgtctgccagccaggaaggatcctttccacaagctttctcttttccttatttcttgagaatggataagacagtttttgtgaagagaggcaactttgtatgatggttaagggtgacccatgaactgctttcaattcagactgaggtcagaagcaggggttgctgcttcagactccctccattcaaatcacgactccagtattctgatactgtttagcctccttttcctcatctgtaaaataatgataacaataatgtccatttcgtaaagttgtgaagattaagtgaagttagtacagtaatgcactttagcatagtgcttgacatataatgtgtggtaaatataagttactgtatttcttgtggtcatcatcattatcatggaatttggaatagtagaactggaaggaggcttaaatagagatcatcctttgaactcacttattttacagatgagaaacataacctaaagatgtcaagtaacttgacaagttcacaaagctagctcctttcagaaacaatactagaattcagttaacacaatttgaatagtttctactatgctctgctgtgtttaccaactcctgatgcagtgggcatttcatccccaagtagagtagcgttaagtgaccccccatgtcaggctagccttgaactttttaagttccatcacacctaccatgcaattattggttggttggtttttatcactcctcaaggtctgcctcttttctctacaagagaagacagggccaaagtcagattcatacttctgtcatccacagggccctgcacatgttagacacttgatacctatttgctgcaaacaatcttgaaatactagttgtgaaatatccattaaaaataaccaacttcatttgttgcattgtttccggaaggtcaagccttcaggtacaaactaagcagatgtcatttttagaaaggtagccaatacaacatttccttgattaaacttcctgactcttttgcagccctgtggtgttccacatttactttaataactacccctcccaactcaggtgttaaaaagctctattttatgatatgattgaagatgaacagaggccatttaagaaatagttgaattctgtttgagtggtgaaggggatcccaattcttggttctagtcctcactagctgtgtgactttcaagttattcatccgttggaagaaaggcagtcaacatgtattgagtatctattatgtgacaaatgtcttcataaatatgaattgatttaactttcataacatcccgaaaaggtaagtattctcttcatttgtataggtgaagaaacagaaaaaagttaagtcgtgttcttaggaacacacattgaagaagaggtctgggaagagtttagtcaagtgtgattgattttgaaagtcacgcttttcccgctactactttgtgacttctctgggcctttgtatcataatctgtaaagagcccttaaagatcatcttttttagggttttaccaaccaacagttttttttttctttttttttttttttgacacggagtctccctctgtcgcccaggctggagtgcagtggcacgatctcggctcactgcaacctctgcctcctgggttcaagcgattctcctgcctcagcctcccaagtaactgggattacaggtgcccgccaccacacccagctaatttttgtatttttagtagagacggggtttcaccatgttggccaggctggtcttgatctcttgacctcgtgatctgcccacctcggcctcccaaagtgctgggattacaggcgtgagccaccgtgcctggcccccaacagttttaaacactgaatctagtaaaactttaaatcgctacagcctccttcatctaagttgccagaattctcatgaagacagtgtgttggagtgcctaagattgctctacttcttacattccttctagccataagactaaccctttttttttttttgagacgaagtctcactcttgtcccccagtctggagtacagtggtgcgatctcagttcactgcaacctccacctcctgggttcaagcgattctcctgcctcagcctcccgagtagttgggattacaggagcctgccaccacccccagctaatttttgtatttttagtagagatggggtttcaccatgttggccaggctggtcttgagctcctgacctgaagtgatctgctcgccttggcctcccaaagtgctgggattacaggtgtgaatcaccgcacccggccaagactaagctttgaaaattgctggcattaaatttatcagaggcctttgctttgttcgctgctcttaagcaaagtaagtatatgcctttatttgaaatatccttgattattcactggcaatttgcctaattgtaatctgtacagcgtttctaattcaaaagaaatcacagctgaaccacagatttcctgattcttcttttgttgatgggatctagccttgatcctagagcacaaggcttacttacctggctgccttcttgaagtctttacttaagttatttgatagggatgtcaaatgtattcaattgttgtttcagcctaaagtatgtgaattatgttttgttttgaaagttgaaggagaaataatatgttaaatcagagaaaggaaagatagttgtattggtgcttttattcctgttgtggattatgctacctgcctataaaaataaacatttttgctataatctgttcccacttgacatccatggtagcaaggcagtggaagatttcagtcacttacaaatacttgttggttgtacatggtttataacatctatctaatgtgcctatctgtttgttgtctgtctaaggaactgtactattttttggctgttatcatgtcttcttagatgtggtatgtaacaaagttttcatggctctttaaaacctgtcatttttgtgctagagttctacattgcactggagctcaacatgggacctggcacttaattggtgtttggtggatgttggcagaataaatatatgtgtgtatgcgtgttacctgctacagagtatgtaggcagacatataatttctcatccaatctagacacttttgtgagtggaaggctatgcaattagaattttgcagggactctcctggtccttaagggatgtctagtcactccattggtggcaattggagtcatggcccaacataagacagctgggagttacagtgctgagtgtgcagcccaggatgccttaggcataagaccccaggaatcatctaatggcatctaatatttgatttatttccttattccctgtaaaccttcagcaactgtttgaagtgacttatagtaagtaatacattcagtagaataatgatgtgaaaatattaatgctgaaatgagcaaacacaatgcctgagattttaatgtagttgaccggtctgggtactttctcagtgtgaagctgaaaactgagagaatgtcaatcacagcatggatttcgtgacttaaggaagagagccaagggattctgcagttgaaaatgtcacttgagggcctgtaatcccagcactttgggaggccaaggtgggcagatcacctgagtccaggagtttgagaccagcctggccaacatggagaaaacctgtctctactaaaaagacaaaaattagccaggtgtggtagcaggcacttgtagtcccagctactcaggaggctgaggcaggagtattgcttgaacccaggaggtggagcttgcgacgagccaagatcgcaccactgcactccagcctgtgctacagactgagactctgtctcaaaaaaaagaaaaaagaaaatgttacttgatcatttactcactgaagatgaagagaatactaattgctttccctttttatttcaatgacatacctattaaattaccaagtcgagtacccagtaggcagctaagtatgtgagtctggagccccagggccagatccaggctgagatacagatttaggaataactggcatacagataggttatttttaaagagcatgttcttagcagtctgtaacattgagcctccatgtcttttaaggagggtctttcatatgcctccccaactcattctgaatctttgatgacatctcttcccaagcacctaactagaaaactgaagtgttaagacactgctatgtacagtgccaggagactgcaggtaataataccagcttgcggccaggcgcagtggctcacgcctgtagtccctacactttgggaggctgaggcaggtggatcacctgaggtcaggagtttgagaacagcctggccaatgtgatgaaaccctgtctctactaaaactacaaaaaattagctgggcgtggtggcacgcacctgtaatcccagctactcaggagactgaggcaggagaattgcttgaacccaggaggcgggggttgcagtgagccgaggtcgtgccactgcactccagcctgggcaataagaacaaaactccatctcaaaataataatgataataataataatagtaataataccagcttgcatttgttgagcacttaactacctgccagatgctgttttgattgctttacatgttctagttaatttaatcttcccaagtacaccagcggtagttactgttgttatctttattttactgatgaggaagttgagacactgagaaattaagtgatttacttaatactatttaatttaattcacccaatactatctatttaattggtaaataggggagctgtgattcatatgcaggcagtctgaaaccagagcctgtgtgcttatatttcgcattctcattatcagtggtaagaatctcatctctaaaggaataatctgttatcggcttaaagagactcataatttagaaagtcttttgtttatatatcattatgaaattgtgtctattagttttccaaagtttactcttttaaagaacactggttacttggagctacaaataagcagcttttccatttgggctttgagaaccatttctgccagtaactcaaacctgatcctggagctcaaagcttaacatatgtggctgccttctttaaatctttacttagttatttaatagggatgtcaaatgtaaacaagacccagctactgaattattctccaaacctgctttttctccaaactttcctgtctccataaattaaaccaccaactacccaatttcacaaaggcctagcagtattctgatttatttatttttttcacccctatatctcatccatcaagtcctgttgtcactacctcgaaaacatatcctgattctttctttgcatttttcttcgctctgcctccattggagtatacattttcatccttactgccataagcttctaacagggctcagagtttccaccttgtccctcactcaccagctagaggccttttgaaaagaagtcaggccactttcctgcttaaatcttccaatagctttttccctggcacatagaatgaaattcagattacttaccatggctggtggccaccaggtcttctactatttactcccctatagtttatgctgccccacccacaccagccttcattctgttcctcagtaggccacactcattctgtcttacttagccgtttgtgttagctgttcttttcctttctgtcctgtccttctgattggctggctttctttctttctttttttttttttttgagctggagtctcgccctgtcacccaggctagagtgcagtggtgcgatctcagctcactgcatcctccacctcctgagttcaaatgattctcctgtctcagccttctgagtagctgggattacaggcgcctgccaccacacccagctaacttttgtatatttagcagagacgggatttcaccatgttgaccaggctgatctcgaactcctgagctcttgatccgcccgcctcagcctcccaaaacactgggattacaggcatgagccaccaggcccggccagctggctctgtcttaacattaagtactcagttcaaacgtcacctactcagagtggcgcttcctgatcaggcagtctagagtaactatctaggtgctctattacattatcacaatatctattaaattattatgttattataattctcagcagagcacttagcaccaactattatttttccttgttaaattaattactttttcccagcagtagactgtaagagctccatgtgagcaggtattttgtttgtcttgtttgctttagtttcagggcctagagtagtatctggatacagcgaaggcactcattaagtatttgttagttaaccaattaattattaatatttcgtagtcacaccttgaagacctcaacctaggagatctttatcaaaagaaccttgatctgctggcagatttgtcaaactcctgtccaggcttttgacagatttggcaaatgccgcttttctcttttcaaaattacattagtagtccttgtaaaactgtgtctaacattttattgtaaccatatttggatttaattttataaattacgtttggaaagaggacaagagactctttgtaaataagcctgtaatttttactggtgacagcttttgtcacctagaatcaatgtgcttattctttttgagattgctgaaatgagctttgtaaatatttttgttgtaatatcattttatggtatattcttcaaattatattgctttatccatggtgaattccttctggaaatggagtaggggagcaccttggatcttttctttaaacccaagtacccaggtttttttgttctgtgttttttctattttcacaccaaagttaaacctttacagtattagttttacatatagacagtcttgcattgtagatgttgtaaggcattgtctctacatataaaattcagacttggaatatttgtaggagatgttaataacacacaacagaggatcgacttctgggcatgttgttttcataatcattcgtcaagctctcatgcttagccttgttttagacactgtaccagaattagagggaaaaaacataatcagcttacattacaggatttacacattgatgtggttcagtcaaaatgcaaatagtattgacagatattcaggggcaaaacacaggggcaggatgaatttaaaaagcaaggggaaggaaagaagaaagaggagggagaaaaatgactatgttattagtcattgctctacacttgaaggctgtaacagatggacacttagataaccttcatggtctggtttaatttactgcatataatttccacagttctttcagatgattaaatgagtggttcttgacaacaattacgaacatttaaaggtggaaatttatgcatatttccctaaattgcatgtcaggtagttcctgctataattttgctaaatgtccatgaatctcttgaaaaatacaactcataaatgtggaaggcctatacataacttccatttcctccctcagattcaataataatatatcattttgtggcacaaatctttttttctttttttctttttctttttttttttttttttttgagacagagttttgctcttgtcccccaggctggagtgcagtggcgcaatcttggcacactgcaacctccgcctcctgagttgaagcgattctcctgcctcagcctcctaagtagctgggactacaggtgcatgccaccatgcctggctaattttttgtatttttagtagaggggggtttcaccacgttaggcaggatggtcttgatctcctgtcctcatgatccgcctgcctccgcctcccaaagtgctaggatttacaggtgtgagccacggagcccggcccagcacaagtcttttatctgttgttaatctgatgttatttagtggaacacttcagatgcattcatagaattatacattttactaaatatatcacagcttgaaatatagtttccccatttttatcagctttcatagaattcttaattgatttttaaatggctaatattgcttataaaaagtagttgatcaagctcttaaattcctatttctgagttccttgttctagttcacactagaccagaggtcagcaaacttttttcatataaatccagataataaatattttaggttgtgtgggtccagtcatcaccgtcataactgctgttgcagtgtaaaagcagtcatagaaaataaatgtgtaaacgaatgagtatggctgtgttccaataaaattttatttatggacaacaatatttgaattttatgtaattttcacgtcacaaaatagtcttattttgattgtttttcaactttcacagtgggttgaatttggcctgtgaaccgcagtttgcaaacgctgccccaaactcaaagtcacatcgtgaattgtatgtcacgtgtcttcaggagaagaaatttgaaacaaatccagagagaattgtgttttaccttagttactccgttacttagtagttatcagctatgtattagaccagtcacatatctgttaaaatcagatatttgattctaaaatatctcaagattagttcagaaaccttgaaggtaaataaatgaaggaccaggaaaagacttcagcttaaaagtatcaggtttttaacatttttgttacaaattggatttgttttcactcacttggatttttatctgcttactttgaaacagttcatcaggtgaaatcactctagaattattaggtcagcttcttttattttcatttttcttcagaggccacacttctgcggaaacaacatgcccaggaggaaagatgctttatatttcagttgtgttacatataggtcagacattactgttttgaactccaaatagtattctcactttatagttgtatttgcatttttattatattattaatacatattgcttgaaacaagcatggtttttggttgtcaatccttttgttaaaatataactttatttattgttattattttgagacagagtctcactctgtcaccaaggctatagtgcagtggcatgatcttggcctactgcaccctctgcctcccagactcaagcgattctcgtgcctcagcctcctgagtagctgggattacagccatgcaccaccaagcccagctaatttttgtgtttttaatagagatggaatttcgccatgttgaccagactggcctcaaactcctggcctcatgtgatctgcccgccttggcctcccaaagtgctgggattacaggtgtgagtcaccgcacccggcaaatgtaactttactttgaagacttttgtcttaatgggattagaactgcattaccatttaaagatgagtttctgctggttcccatagaagtgtcaacatttttctacgcaaattttttctttttttaatttgagacggagttttgctcttactgcccaggctggagtgcaatggcgcaatctcggctcactgcaacctccgcctcccaggttcaagcagattcttctgcctcagcctccggagtagctgggattacaggcatgcgccaccatgcccggctaattttgcatttttagtagagacgaggtttctccacgttggtgaagctggtctcgaactcccaacctcaggtgatccaccgcctcggactcccaaagtgctgggattacaggcgtgagccaccgtgcctggcttctacctaaattttttagtactttgtatactatcttgtccctctttttgtgcttcctcttaaacttatgctagcttggataaaaatgtactttaggaagtctcctgacatgggagaaaacaattttgaaagcttcaacatacaacgtattttgtgcttcatttcagagtaaaatttttcccaaggtattttgtttttctgggactattgttagtgcatgttgtttttcctgttttatgcttcttttcaacctgtttggttttcactaagggattccaatgggttttttttctattagcataattaccaatgttgaatgtcacctgggcataactacttttcctaaccctgtcataccattgctatctcttagcatgttttctcaagtgagaaaatgtcttgactgaatggccttctcttcttcatttactcattctctattcactctagatttatcaaatacctgctctatgtgaggcacaatactaagcactctgtacatacgtgtatttttttttttttgatgttagagcttcatcactgcacccttttttttttttttccccacaaacaaggtcttgctctgtcagtcagtctggagtgcagtggtgtgatcatgctcactgcagcctcggacttctgggctcaaacagtcctcttgcctcttcctcctaattagctaggactacaggtgtgcaccaccacacctggcttttttttttttttttcttttcggagagacaaggtcttgccaagttgcccagactggtcttgagctcctggcctcaagaaatcctctcacctcagcctcccaaagtgctggggttactggcgtgagccaccatgcccagtcttcaccttcttttgtagtccatccccttctactattctcttcctgctttcctttcacttcgacttttccatttcaggcttttaattcacttgacctccccctactgccctctgccacttgcctgctgggactgctgcccatcatccctctcaatgctgcctatcatccctctcaatgctgcccatcatccctctcaatgctgcccatcatccctttcaatgctgcccaggcctctagctccttctcctccttgaaattgcaggggcctgggggtgtttgtacagtggcattagtgcaatgaggtggacttagttagataagtatggggaatgggagttcctttactcttgctctgctggctccaacccagggcagctggctaaagcagtccttaaccatgaggatttcttccagggtcatgcttccagtttttagtgaaggatcacaaaaaatgtttagtgtcgttccattgatttttttcccccctcgattgaagctttttgaaatgttttttgaactgccttttgtgtcaaacatgccttgtcttaaaatgtcctgtattactctgtccacactgaattacaggcacacctttctctcaattcaatgagagagttttcagtgtgatgtaaagaattgctttagctttctgccaggggactgtgtctacccttatagatgactgtttgaattcaacattttgtattaatagttgggcatattcataggttatcagaactggaagggacctgaggaattatttcactttcctgttttacatgtggaaactcaaggcttagattgatgaatgcaaagctcgttgtcacatgaatgaaaatctaggattggaatttgagtctcctaaccccaagcttttgttgaatcaactgattttcgatagtgtttattcagagaagagatatgaataaacaatgtcctgtgagatgataaattctgtattttttcaagcacctggaatattgattcatgtctccctaaaatatctcaatgttactgagactaagtgccagtggtcaggtatgcttactacaccagtgattgtcaggtattctgcacaaaggatatattcggctgttattcacttttgttatgcttttcctcctttaagaattatcactttgctttttccctcctggtcataaagaaatcatagttttagaccttaaagtgtgattttaattgtcctgtcatcttgatggaaataatctgattttcttgactcagattaggaatttttgctatcaccttttcttagcaaaatatgattaatcagcaaagttctgtagaatgaagaattacttctgttttcaccagaaaactcttgaactgttctagtgaattcagtcctatcccaggctgattctagatagttcatctttgggttagattatatgtcggatgaggaaatgggtagatttgggtgtgggtctaggcctgcgagtgtttgtgtgtgcatatacacatatagaagtaaaataattgtagacgtgctgctttttgggggatgatcttcatcaggtccacaaagctgcttcaccatttcctggagagatggtcctttggcctttcatagtggtaattttagctttccacatatttctgtagatgaatgtatccaggcagtgcattggtatgagttaccttctccctcccacgtggaggaaggtgttggaggtgacagttctcacgatgtgtagcttcccacagccattttggtaaataggcttatccataggcactgtgggggctttagtggaaatcttggtgatgcctgtagatttcggtttagggatccgtgctgggattctctgcttgcatacctccttgatcttgaattaaacaagagaacaaaaggtaattaatggtacagttggtggagaagtagaaattgtttaggacatggagtcagtttggaggatttggctttgaaagcaccagtttctggggatgtatcagatcaaagatcgtcaggttgaagaaaagaatgtcagtaaagtaatctggtgtgtgttgaatgtgtgctgtgtgcacagttcttgatagagatagtggtagatacagagatgaatagatatttggcaatcacggtgtagtaggacatatacaagagtagtgtcccaaattaatctcaaagagccatgagattgccagagaaaggttaatttcgaatgagattgtctttaagagtgcttcatgaagaatatggcatttgacttgggccttcagacttttaaaagttttcacagtatgagtgagatgggcagctccaatgatgattagtggaacagcttggtagtatgtatcaagagccttatgaatcttttctaggatgtagagaggcagtcaaggatatttgattttagcattgtttataatgatgaaaaatggacagttaaatgaataggatgtgttaaatgaattatagtataattatgacaacatgctttgttaatgaggccaaagcttcaggaaaacgtttacttagatatgttaaaagtagaatttaaaactgtgtacatgctttaattatttacatgtgaagagaaaaatactaaaagaaaatgcacccatgctattggttgttaaccctgattagtggacttacaggtacttttgatttttcttacattttctgtgttctccacatattttatagtaagtatgctatgagaaaaaggaacactaaattgttttaaaagacgaaaaaggaaggaaacaacttggagatcaggacatttctgtgaacaaccatattatccaagccatgagcagtagaagctgcagttgaagtcagtgacagactaatcaagtctgctaatattgtgactatagcattaataatagccttcccaagatggatttctgtgatgtcctgtaactttatcaagatttagattgggtctccaatttagtgttcaaaaatctatgttgggatcgtctttaaattgtagatttctgaatcttactcctatgcattgtaattcattggtttgtggatatgtccagcaattcacatttttaataaactctcagagtgatttcttcaactcaggtggttggcctaccacacttggaaaagtgctgccataattgaacttcctttagatgtaagctttattttttcttcacctggaactctagcctacctgggtatgcatagttcaatactgtgaaaggccgagacagattggtatgacacacagtattggtggagctcgtttcttttgagcaacactgatacgtgttggtgaagaaaatgtggcttggaatggtggtcactgatactttcaggcccagctgcctgaaggttactgggctcctacttgtttctacaccattgatgtgcaagcttttgttttctaggtaactccattttcattacgtagtttttacctctagatggcagcaaaggcttgttattttatcagaacaaccccaattgtcattcctaaatctttttttttttttttttgagacggagtctcgctgtatcacccagactggagtgcagtggcgcgatatcggctcactgcaagctccgcctcccgggctcccgccattctcctgcctcagcctccccagtagctgggaccacaggcgaccgccaccacgcccggctaattttttgtatttttagtagagacggggtttcactgtgttagccaggatgatctcgatctcctgacctcatgatccgcccgccttggcctcccaaagtgctgggattacaggtgtgagccactgcgcccagccattcccaaatctttaaaaaaaaaaaaaaaaaggcctagcgcagtggctcatacctgtaatcccagcactttgcgaggctgaggcgggcggatcacttgaggtcaggagttcgagaccagcctggccaacacggtgaaaccctgtctctactgaaaatacaaaacagccgggcgtcgtggcgcactcctgtaatcccagctacttggaggctaaggcaggagaatcgcttgaacccacgaggcggaggttgcagtgagccgagatcatagcattgcactccagcctgggccacagagcaagactctgtctcaaaaaaaaaaaaaaaaaagttgttttttttttttttcttgtatgacttatccttggacatgtttcagtaaatgaggtatggagcattaaaatgtgtcatctcttggatcatttttatagagcgttatgtcaaatagctccaagaaagttttgtccaaatttggaatgcatattgcaagagaaatacatgcatatggctcttttaagaccacacagtgaatgttctactcagagttggaggctcctgggtttcatcaaagagcagatgtcttggaggagattaagcaagttggaaagctcattcatagaagaaaacgattttttaataaatgcttaacccagttcaacatgaagactgggatttggaatgccttaaaagtctgaaggatgttgagttcaatgaggcagaagaagtggttccacctagggagcagtagaaagaagaggagtaaatttgtggaatatattaaattctaaaagtgttggtttgttttatccatagattctcaaaagaaacctagcaatctagaagactccctggttacagtgagttattagaaggcattgagtcataatgagcaaaagaagtatggaaaggtgaagtgttttcagttgtattcaaagtctcagttctatagcccaatttctacatgactcttttgttcttccactttatcatggagcacaaatataccagaacaaaatcagcatttatggagaaactatcagatctcagacagctggagtcaggatgtttccttttctctaaaggaaattaattttgtaagtgctttgaactttttgatctgtattgacaacgtgttgtgtaagaaagcagtgttttctcaggagcggtcctgactccagggactgcatcacaccttagctctagaggttgagaagttgaagactcccagagacctctggtcattttgatatgtggtaattgaggtggtgtgggacggtggttggattcagggctgctcactcccttggggacttagctgtggaatgcttggccaaggccatgtgttatcagaattgacagtgtttttgtagttttgtttttatctcagtgtttaatgggaaagtatataagcaatgatgatggatatggtgatgaaaagaaggaaatgctaaactgaagaaaaatatatttgaaatattattgccttcttttcttttgtcttttatattgtttgacaaatcactgctaatttatggggagtggtggaatggaaataagagataatgaatctggcagctagcccaaaatttcataatgatgctttggcttttttctcttgatttttctcagagctcccctattaaacaatgaaactttatcactacaagttttacgctttatacaggaaagggtctttcaaaggaaagctgtttgattttattagctcattctcattaacctcctatgagagatcatttggttttgaatagtgttctacttctatggcttatattaaagagttgtccaatatctgatgcaaaggttagagtaaataggtgcctttattctgtaatgtatcatggtttgtggttgtacctagtcacctctcaatctctctttctgtggaaattatacagtcagcagtgggggcaatccaagaataaacattgaaataaagttttcaaaatcgctccaaacccagttgcccccactttgtgtcagaccaagcatcagatgtagcaatactttgttaaaataaaatatactaaccttaaatacttgtcttcctcatttgttctctttttatccatctgtgaacttttttccttttactcagcttttctttttttgtaccctttcctccctcccctctcctgtgtctttctcatttcttcatttgcacccacttaattgttttagtcattctcaggcttacatcttataacagcctttgggtagtatctagagcacaagccgtggagccagtcttgggtcttcattctagttttggcactaactagctgtgtctctttgagcaaacactttacccatgtaaacctcagtttcctcttttgtaatcttcatctggggattgaaatacctacttgtaagttttctttggggagtagagatattgtgtaataaagtccctggcccatctaaagtttcgggtgttaggtgttcctgttgtgatcatcatcagcatcatctttgtctttttccttatatcacttcttaagatgcctatttcttggtcataatcctaacttctttgattgttttacctttcttgttttcctgctttatctctcaactttcctctctctccaattatttataggcaatatgttgctaagggtgggagttaaggcagctgaataagcagcactgattcctgggctatacttctaatcacctttgacccagaaaaggcccactcacatgtcctttatcctccttatgctactttgtctggtccttgtgaatctttcttttttagagttcacccagagacattatctgttctttcctgttttcatgtcttttgtttgaaaaatgcagtagttcttttagatcacctgtaaagtcctttggctttgacattctgtgattctgtgaaaaggacaaatgcaggccagctatggctaccaggtgcctttattagccatatgagcttttgttgagcacctactatgagcactatttaagtcctgggtagaataggaccatggttcttaaattttatatgcccagagagcctgttaggatgcagaatccctgcagtgggaattaataggtctgggaatgtgaaactctgcaaagtcatatgtgattctgatgaaggtggtcaatgactgcattttaagaaacattgatataaggagttcaaaaataaatgatagctgattcttgcttttgagatgatagcataggaggggtaacaaataattatgaggtagaatgacgtgcaataatagaattacagacagcagttttggaaactcagtggaaaactaaaaagtaaggaaggttttccagaggaagtgacacatgagggatgagtaggattttagtatgaggaacaaaggaagaagagtatttcagccctacaaacagcatgatcaaaggtaagaaggcccagtagtatgtgggaggatagttagtatggtgtcctggtgaagatgtgagggtatgtccagagtttcaaagggagatgaaacgaaagatgaaggccatggtagaaggtttggactttgggcactaagcaattttaagtgctgttttctgggaggctggagaattgctgtgatcagaatggtatttaaggctggattatagaggtgaggatttaagtgtagtagattaactatcttacagtaccatctgtcctaaattctgggcttggggagtagtagtacaaataagtggggaggacagagaaagaaataatatgacagagtggaggatgagcagagaagtggagaatagttcccagatgttgaacctgagcagtggggaaggtgatggaccatcaatagaggcgagacaaagagcagttcaagaaagatagtatattgggttatgggcgcatgctaagtttgaagtgtatagttgggccttccatgtggaactgtttggtagagttgaaattttggagatgttgctttgaggatcgtggtagagaaattgttgatactactcaagtgcctgagacagccagagagaaaaatgtaattcccactcaactgccgctcttttcttctcccaccataggtacttctacatccctttcccagagcctgagatgaattttgtgggaccctaccatgtgcccacatcctctgcacaaggccactctatcttaatgataagaatataactagttctgagaacagccacctaaggaggcatttattcccattacttgaacagtacatagtgattgaaccactatccagggagtgattggcttgctaggggaaaggaaatcctgcacctctcttccagtaacctggctggcccctcagccattgtgtctgaaccaatcagacaaattacataaacttgtactcgcagaaaggtttgccactttgtggcacagagccatgcagtaaggacaggatagcctccctaaagcgtatttccttccttattggcagtctgagaaaaacctggaataggaccatatttgataggtttggcctaaaaaaatagtaataatcgtccattgttctccctagtcttctcattgtccttagaagctataatcagcagcctcagaagcatttatatttttcagtttctgtaattaatacatactcttataatcaggaaatttcatatgaaataaatgggctgcttatataaattactatgagagctgttcttctcagcatgatccgtactcactgattccctccctgttgccctaaaggaataactatctgcctcttgtgttatggaacttttgaggacctcttgcagtttttagttagctcctgtttatataaaacagtggttttctgaggcttcaaaagtgactgatctcaggcacagtgaattcaggcaagaacaccatgaaaaggcataagaatagaagaagaatagctttttctagttaaagagaagagagaaaaaaaaaaaacagccaaaccactaattgtaaaggataataatgcatttttgaggaattactttgagttgtttgaagagtgtctgtgttgatgcagattattgtattgtgaggggagacataggagccaacttgacaactttcctttgcagtggcagtttttacttgggatgcttccttggtttacagttttgtactcctgaatttggagactgacagggttgaaccccaacacttctccttctgacctgggaagatacatagtgattatttctaaaaaatgattttgggagtgccagtcttattaagttacagtgttccttgagaaatagaaatccagatttagagtgtaccatctgggaaaattttctgtttctgcaaaggcagaatcacaccaaatgtggcctaagttggtggtgcttgtctttatagtggctggaccttgatcccttgattgccttttctgaaagtcttgggtcattatcataactgtcaaggcagccacctacttataagctcagatgtgcatggttgtgatgttccttccgtgaatcattttcactcacttctgatgcttttctatcccatcatctctgaggctaatcaggtacctcctgctctgcacatattgattgcctgtccaagctcattcttcatgcttggcatttgtgccctttgcttatagaatcttaccttaggataaagtggacactgactgcaccttttgtgttctgagaacagtctcctaatgagaacatgagcttctctttggacttgctttctcacatctcctatcccaggtcagtcttccccgtgcctgcccatttgtgtggggcttggcttctcacattcattatctcttgtcaccctaacagtggcttcagggaagcaggtggagttggaaggagaggcaaatcactcttggctatggtgatcatgggaggtttcagaagaggcgagcattgatacagacccttcagtgtgggtcttacttcacttgacaagagatgaaaattgtgtccatgtagagaagtggggaggagaaagccctgcatatgtttagggacattctgagtgttctggctgaagtggcagatctgtgaggtggagcacaaggaggtaacattagacaatctgtctgtcaccacagattgtggaaaggatcaaattcaacttataatgaatttaaaaccccttgcaactcagtgtgttgccacggaaagagaatggggcaacagaatcagacctgttttcactcctcagttttgtgacatactaacagaatgacctggaacagctttccttatatgtcagagttttaatctacttatccctaaagttgtcataatacccactttctagggttgttgtaaaataaaataatattgtataatggatttgttttttgccctctcttttatgttacctcactatgcagaaaccttctgtgaagacacagagactccctagtgctgtattcatggttcttcacaatcaacaggtctttgccctttaagccttaccctgccccaaccatctcaacttcatccacattgcactgctcactgttccttgaatgttgattatctgccctcctgcctgcccccacacctttaccttgtgggcacctctttggagcacctttcttttttctctatatcctagtcttccccatcctgtatcccctgctcaattctcatctgtttctgaagcctgatccccaaatcccacctgaaagtaacctgctcttcctctaaaatcctgtagtacttactgtctatatagttccttctctgtgttgagctcttagttaccttttaagctaccccttaactcccaccttttattccaaactttaacatctgcatagctgcctggcacaataatgagcaatattgcatgcttcataaatatttgttggttcattcttgtaggtgattggttgaggaatgaaggaagcctgtatcctaatagaagacattcatgcctgtggtggttataagctaataatacacagggaattgcagcttctcagagaggaccttttagaaaggtctaaacagtagagagttatctcttcaattcttgggattcctgctgaaaaccaattcccttctcccccgactccatttaaagccaaggtggttggtttctagactcttatttctcccaagggcacatgaaaaatggaaagctctagttgacctgaaaattctagtttagaattcaggtatctttgaaagagacagaagtataaaatactgtaataatacaaatatagatgttcaagtatgaacatgctctcagccagtctgtcaagtaagtggaaacaattatgcaacaaaactcttcagtataggtttttaaagttgctttgaggcttatgtttcatcagattcaaggttctcatctctagacaccagacataagagttttcatatgagttgtcagatttttcccacagtgttatataagagtggaactcttatagagtcacttggtccatctctttaatgtggtgatttttaaccagagggcgattttgcccttcagggaatatttagccatgtctggagatattattgtcacagttgggggatgctacatggtgtgtaagtagaagccagggatgctcctaaacattatacagtgcatgaacacctctttcttccccacaacaaagagttaccaggccaaaaccattaatagtcctaaagttgaaagaataatggggagaaaaagctgataggattaggggtaaaagaaattaattcgtagaatcttttttttttttttttttttttgagacagccttgctctgtcgcccaggctggagtgcagtggcgtgatctcagatcactgcaacctctgcctcccgggttgaagcgattctcctgcctcagcctcccaagtagctgggattacaggtgcccaccaccatgcccggctaatttttgtatttttagtagagatgggatttcaccatgttggccaggctggtcttgaactcctgacctcatgatctgcccgctttggcctcccaaagtgctgggattacaggcatgagctaccatgcccagccaattcatagaatcttagagaaggaaacatctagtagttttgacatctgtaagtggaaaaatgaggaagaagtttaatttctggaggaaagaaactcatgcaggttgttggcttatttatgctccaactttatttcccaaaaggaattttaaatgatttaaggagggtggcaagacttcaaattcagaagtcattggaagttagaaccagatgtgatcttaaagatcaccaagttcaattcgcttatttcacaaaggttaaatgacttgtccagggcctcacagctgactagaaaaggcataaactagaacctgatctatttgcctgcctccagtgctccttcccccaatcttttcacttaactgaggctttgttaatctactgtggtcttccttaatctccagtttattggtagagattgacagtttcccacttgattaaatgttgtctgatactcttgtttcatttctttgcccaggttaataagctcttcaagggcagtgaatctttcatctccataatatctgccccagtggcaagtaagaggtacacagtttaatgtgtcatgatcagtggattgatcgattgtgtacatgtgatgctttgaagaaaacatattgcatactaagacactgcgcatgtcactgagacacaagtttggttgcataaggatcgtttccactcacttgattgacagattggcccagagtatatgtacatttgaacaattatatttgtgttaatacattgtacctttgtttctttcaaatatatcaaattataaactagagttttcagataaactggagctttccatttctactatgcctgtggcagaaaaataatgtagataaccaaccacctttgccttttgccggaacagcagataactccctctattgtttagacctttctaaaaggtcctctctcggaagtctcaattccctctgtattagcttgtaaccaccacaggcatgaatattcattagtaacctcacctccacctatccaaaagcctcaggaatggctgaggacgaggtaggctttgtaggtctgtagggcttatatttgtatattgtagttgtccaaatatggctagcctttaaagagctgaacaaaacaggcgcaatcccatcataaaaatgggctaaggacatgaatagacaattctcaaaagaagatatacaaatggcaaacacacatataaaaaaatgctcaacatcactaattatcagggaaatgcaaatcaaaaccacagtgcaataccaccttactcctgcaagaatggccataatcaaaaaaattaaaaaataatagatgttggtgtggatgtggtgaaaggggaacacttttacactgttggtgagaatgtaaactagtacgagcatggaaaacagtgtggagattccttaaagaactaaaagtagatctatcatttgatccagcagtcccactcctgggtatctgcccagaggaaaagaagtcattatatgaaaaagatacttgcatataagtgtgtttatggcagcacaattcgcaattgcaaaaatatggaaccagctcaaatgtccatcagtcaatgagcggataaagaaaatgtggtatatatacaccatggaatactactcggccatgaaaaggaatgaaataatggcattcgtagcaacctggatggaattggagactattgttctaagtgaagtaactcaggaatggaaaaccaaacattgtatgttctcactcataaggaggagctaagctatgaggacacagaggcataagaatgatacagtgcactctggggactcaggggaaagagtgggaggggtgtaagggataaaagactacacattgggtacagtgtacactgctcgagtgatggttgcaccagaatctcagaagtcagcactaaagaacttattcatgtaaccaaacaccacttgttccccaaaaacctattgaaataaataaattaaaacaggccaaaaaaaaaaaaaaaagatggtctcaggtaacccctcaaatatcataccaggaccatttggctatgaggaggaagaagaactcactaaaataagaaaactagtttcagtttttcaaaatattgcctcaaataataagataagttttatttctcttgatcaacaattttgacaatgaaattttaaatgatgccacaaataaaagtgattatccctggaatggctgactgcaatgccaaaggttattcctgaatacatttttatggtggcattctaactgtaaaacctggtacctgatggaatgttgacagatttgtaagtgctcccatgtaaatggtgttaattcattatcaaattatgaagtacttagaggtgttggccagttaactcgctagactccctcaagattccttaccctacagcattgcctttgggggatggctgctctgatatattgactgcccaaaagccttacccttcttgatgtaccttgaggaatggaaagggtccatctgctggaaaggaaagggcttgaagtttaagtaaaatgaatttaaatggggtttaaggtttgagaaccttagtaaactacttgtcttccttgctctttcttgtatttgcttcactgtgccataagttgaatggagtcctttgttttggttcatctaactgccttatttaatgtgtgttctggacccttcccaagaaatgctacagatttaagttgagggcctgggattgagagagaaacagaccttgtaggtgtcagacagcctactttagctcagccaaagatttaggcatctatgctttgctacagttataaaaccgggaatcttcccacccaataaaatggaagtttttattgagctttccttttaaataaaaagaaaacttggagaataaaccttctgtttgtcatgccagccactagagggtagaatagccacatttcctactacagatgtaatttaaagagagggactatggtcagaatacatttgccagtgcttgtcaatacagatgctttttgacttatgatggggttagaaccacataaacccactgtgagttgaaaatattaaaagttgaaaatatgtttaatacacctaacctactgaatatcatggctttgcctagcccaccttaaacatgctcagagaacacttacataaatctacaattgggcaaaattgtctagcaacacagcacactgtagagcaggggcctctaaaccctgggccacggactggtagcagtccatggcttgttaggagccgagcggcaagcagaaggtgagtggcaggcaagcgagcattactgcctgagctctgcctcctgtcagatcagcagtggcattagattctcataggagcacgaaccctattgtgaactgcacatgcgaggggtctaggctgagcactctttatgagactctagctaatgcctaatgatctgagtggacagtttcatcctgaaaccatccccccaaccccccgcccatggaaaaattgtcttccatgaaaacagtcccttgtgccaaattgggaactgctgctgtacagtatcggttgtttaccctcatgattgtgtggctgactgggagctgtggctcactgccactacccagcactgggagagagtatcttacagcatattgctagcccagaaaaagatcaaaatttgaagtaccgttttagggcacaattaaccagcagaagagtttgttaaaatgcagctttctgggccctacgcccccagaggttctcattggatagctctgagtggaacttaatatcaggggattctcacacaggtatcttggattttactctgagatacgctgatctataagagttttggggcatgcatttttgcctatcttttctcttgggattacaaagcaaaatgattatttggaggaaaaaaatcttaataacagaaaccagggtataggaaaaagctagagtgttggttaatttaaaggtctttccctgcctttgtctaacatatttcaaaggagactcactttgtaaatattcagaatcaaagaagctactaaaacgtttttattgggagttttacttcaaccagtaaagaccatagaatccttagactacaaatctctaaaatttttgataaaatatcccttctatgaccatctcacagctcccctaattttatcctttatgggttatgtatgtggtttagctctgtgtcctcacccaaatctcctaactgaaatccccgtttggatcgtggggtggtttcccctgctgttcttgtgatactgagggagttctcatgagacctgatggtttaaaagtggcagtttcccctgtgcactctctcgctctcttgctgccaggtgagatgtgccttagcttttctttgcctcctgccatgattgtaagtttcctgaggcctcccccagccatgaggaatggtgagtcaataaaacctttcttcttgataaattacccagtctcaggtattctttatagcagtataaaaatggactaataaaactggtgtcatgaagaccccaagcctaatgtcttagcattgtaaaatatagttgtggagaccttacaaagagtgtatgtaattttatcatgatcttgattgaacaagtatcaagattctttcttatgtgtacagattcaagtgtagtaatgcacaatgtccttctagtaaggatgacaattttatttttgtcagtgcccctagagagcagtggcatcctcctggggaaagttttgccattgcttttaaatagaaaaaacatgataaaatcattcgaatctgtgataggattctaccttttaaagagttaaagagatagtgggaatgtgagtaaaatgaaacttcgttctgaagcgaggacttagaccaatgaaagaatggtatgagtttttcagagagacgaaaaaacagtctatcttctgtgagccctcatggaccaaagaatacaaccctccacccccacatatttcatatgaagatttctgaagattttccagtgtcacttcctctttccttcctggtttttgggggagttctatgattatctgtcaatgaaaaaggaagttctgtaatcttccaatctctttctctctctcctctctcacacgcacacaaaaaaatataagaaatcttttcaaaattaaaggccagaaatctacattgtgtcattttaggtgtaattctatagaaaaaaagatgttttgcagaaattatgctgcctttatgaactttaattagtaacacttgtaataatctacacgttattaatctgtctcctaaaatttattttgatgctgatacaaattattatactgaaggaatcctcccagtagaggtacttctaaaagaggtattccttgaaagtttggtaaatttccagttatgttagattaactacttaggaagcctctatatagttaaaatctggaacaaatgattaaatgagaatttgtgcattatcataatagaacacaagacttatggtgttaactttattatagagaatttctgtagctcacataagaaattgaatcctttcaaaatgggtgggctgatgaatagcccaaatttggctcccaaactctattagttacaagtgtgccaagaatggatttcttccctccccccgtcccccaccagcacttgggacagccaagaggaacctggggtgatgggaatcccttggctggttatctctgcctctttatctgtttcccccagtgccacacaagcatgtgttttgtttatgccattatgtgacaaagttgggaagactttgttcttaaattctgatttccattgttcataattttatgatcagttgatcgatgccttccaaaatattacatgtacccactctcagtaactagaaaaagatctcatgaagcagcagcattatcattgtctgttttgaaagagctaaaattaagtttgccattccttctagagttctggcccaaggtgacttaaaaacagttttaataaacatttagaccatcatgtattttgtaatacagttgggtcactgttgattcctaagataaatgtgtttaaacagaagctttctcattcatcagcagcctcagctttcatccaaatttatttaatgatgatgcaagcccatagcgttggtgttgcagttcgtcaccatggaagtgtttctgtcaacaaatcctcgctttactatcatgaaattgattttgtaggggaaaggaggataattgtgaaagcttccttttattcttaaagatcttcacagtttgcctggatgtctaaatgaattgtatttaaaatcaataactggcaataaaattaaccacactaaattaacaattatgaggttagaaaaagggaaatggcaataagctactttgtctgaaatcgtcgttttggaatgtgacttggggaccatacttgtaatttaaatgttccctgaaagctgttgttctctgctcagaagtatggattatccccagggactcccatgaggcagatatcagaatttctaggaggattcggctgagttattctcatctatattgtaaatggcataataatcacagaagaaattcacactatattacttctttcaactaacatactgtattttttaaatatgccttttctatagcttatgttcataactatctttggcttttatttgcttgtttaaaaaaaactgtaagaggttaaaacaaaaaaaaaaactgtaagcttttgaatgcaggccccttatgaacagggtaggtagcacctacattaagtaattcaaactgttttgggaaccccataggaaaaagaaacaagaatgacattttctttttttttttttgctttgaagtagagtgttcaagagtttatgtcacagtggctggttccagatttggttgtagacatacatgttctatgggaggtttgatctctggtagaaatacagtcaactcttgatttgtcaatgtaactatatttccaaatgtactttctctggcttcctatcacatgtcagagctttttaattttatcatctgcttctatgtgctcatgaaaaccaaaattattcggtagtattttatttcattattataaacatttaagttcctaatgtagtctaagcactgtgctgggctcttagagatactgaaatatatcccaagcatgaagttatgtttgcttctgaaagatcttatagttcactttgaaatcaaagagatgtaatttttatttatttgaaccacttttctctcctctaatatgtgattagaagttgaccataaatgggacataggtcctgtttgtttttaaggaagaattaatagagactataagcaaaagacaaaattctattgtacatgcagaaatataacacagaatgaccaaaagaaaattcagcaagcaatggtaaaaataacaaattatttactgttttataatgttaaagtatttcaccaagacaagttgcagtcaaattaaagtgagttatggaaaatgaaatacataaagatgtatttatacaagtgcagactaaatattttccatacaagtatgtaaatgaaaagatatacagtaagtgcacactcgatatgactatgcaggcaacagttagtttcagatactcttgtatagttcatgcacaaaccttcccaaagtacgagttcagtcagtcttgggggatatggagggatgattaaaaaaggattgagttccttgcaaaaatatcagtatggactggatgagggtgagcgtggtcagttatatatattacttactgtaatttgtgattgtcgaggaagaggtgtggctgttggtgtgatagtaatactgctggtgactttattggttgttttgtttagtgccccgttaattaagccttgagttcggttatcctgcagtggtgctgaagggctggcaggtctcacagggctggctacagcttgcatgtaaggacttcctaagtgaatgtggattttattatcctcagtagttatcacacttgagctattgctgtttgaacgctgaaactgccatgatgactgccggtctggggagactctgaatatcgcatgcttggcactgatttctgttggttctggggagcgtccctgctcaggagagctagctgaaccagtcacagccaaaacctgaataggggacattgtcctttctggagttagagaaccacaagactctggggtctgtgctctggcaaaggttgccatggtaattggggacatgccttgttctaaattcatgaggtcttcggtagaggttttggactttactggtgttatggaggcgttttggaggatggttatcctttgctttggcgtgccacagttcggtatcactgcagtactcgtgtaagagtgaggactctctgtggttggacttgtgatttcaagagtggctgtgttttgtacatggtctggagtaacctttatatgaagtggctgcccaggtgtgtggcttaggactagatctccaggttgcacaaagttggcattgggtttagtttgcatttttccattctgaagatggccctccttggatttcatccagggaatccatagctttctgttaacaggacatggagtagactggctgcatttgaaggacagcacagatccctcatcattagggtcctcgtcttgattctcactctcctcatataactgaccattgatgactgcacgttccagaggaatgaggctcttgtaatcaggtggttcattgtctactgcttctgtctgaacttctttagaaaatacttgaggatcggaaattcttcttccattgagactaggcctgaggctcttactgaaatgccggtacctctctaactccttagtgaggttttcaatctctcttcctaaatctctgttcctgttttcttgttgatttagttttttttgcaggactgagtgatctccctggaggtgacatattaggtcttcagttgccatgtattcatgaattttctcttttaatgcatccacttctcttgagaggtgccctgacttagcttcttcttcttgaagccttttgaaaagccattgttcatggctggtctctgtcttttctgctaacttgtacttagcaagttccattttaacatgttctagctctttagataaaaattgagctttgtctcgttcattagcataccttcgttctagagtctcatattcatcttctgttttcatgaggtcatcctcaatggctttcatgtcctttagcttcagtttcagtctttccacttcttgagagagctccttaatcttattgttttcttggtgtaatgctgttgtggatttcccagagtcttgatttaatttgttttttaggaaatctttctcaattgcttccaatgattgaagcctatttttcaacatattaactcttgacaggagatcatttcctttctcttcttccgctttcaatttgttttttaaatcatctctctccttggttacgctgtacatcttttcttctacatcggttttggacttgagcgcccttttagtttcctcaattaacttctcagtaactgttgttactttattttgctccacttgaagctgagaagaagcagcttgtaatttatcttcagttttctttaatttttcactcattgttttccgttcatctacaaacatcacagttaatgttttcagtttagttaaatcctcttttagagtgaattctgtcttttctagccgactttcaatggcttctagctctttgatccttacttttaaactctccagttcttgagacaactgctttgtggtcatcctttctttttctaaattgcatttcagagagtagcattcttgtttgcttttgttgaaagcgtcttctaacttttccagagccataattcttttactgagtttttcaacctctagtttaaagtctttactctgtaacgtctccctttcaagcctcttattgagatctctgcactgctcctccatttttatgagctcttcatctttcccttccatatctagcacacgtttcctgagctcttccacttcagccatgataccagcgtttccatattctcccttactgattttttcttttatatcttgcagctcctcttctgcttttcgtaaagacctgtttgtctcttctaactcatcaatctgccggctgagtgctgccagcttttgttgaagctggcgattttgactgtcctcattggtgagcttcgccataattgtgtcttggtcttggtgaaactttgtggtctgcgtttgcagttccttctctagtctggttgccttctgctcttcctcctgaactctggcttcagcaagggctagtttggtatgtgtttcctttgcatttgtggtcagctcttggattttctgtctttgaagggtgagctgtgccgtcagcctttgctgttcatccaccaccatcaaagcaaaagacttcagcttggtcagctcctctttcagggtggtgacccttttctccttttcttgctccttctcctcctgagacttgatttcttgatcaattagcttctttaatctgaaaaatgtaaagtgcattttattttgtgattgatgctttagtaactcatcgaatgtacttaaatatatatgtaatttagaaattatgtaattatatgagctgtgtcagttcatatacaatatgcaaaagagttcctgaatttgatgacagaggaaaatcttgataaagttatcttgcttttttatttgactaccattgatcagtaacagctgcatttcaccaggagccttagtaaaagagtaagggcaagaatatttagtttaaattgcttgggtaacatgtaattagtaggcagtctggcctgaaggctgtgaaaatagccacaagcttgagatgatgcagttagacctggcttcaaggccgaccctactcttaccaactaattgatctgggcagttatttaacatctctgagcctcaatttcctcatatgaaaaatgggggcaataattttatttacttcaggggctttttatgaaaattaaatgcggtaattcatctaagattctcattgtcctggcacatggtaagcatttggtattagttgttgctgctgtctttattaatatggttattatatttatcaaatggcttgcttgaaccaaagtgttcaattaatgtttgatgttcaagtccttgattcttagttaagaaaaaatttagtcacattgcttagaagttatgcacttcactgatagacctctgtgccaattaaaacttggtttgcactagcacaacattattctaggaactacttcacatatatcttatcctcatagtggatagcaattaaatgaggagaattgagagacatctgtatgggtttggtgttttcataacatttgagaagagcatgcggtttggtaggaaagtgcttattgatgagagtctgatgctagacatgacagaagagaaactctgttatcaggaacataataattccctcttaaatgatgactactatgacatgctattttcttcttttatgttttaaatttgtcagcataacaggagggtattttacatgtagtataaactatctcttccacttaagtagtgaggtcaaagttttaaatttgtggcactctcaattatactgcgaatgggctgattatagaggatgtaattacagctttgcagtactgttatacagaagctaaaatagaatggaatccctaaggaattgaaccaaaggacttgtcatggatgaagttatgactacttacattctgataggtatagagaattcataaaactttaatgtatcttttctattaggaatgagttaattatcaaatgcatgtctatcatccttatcacagaacttactttttgaaagttgtgtaaggatttgagagaactttttatttattttattttattttattttttgaaattgagtctcactctgtcgccaggctggagtgcagtggggcgatctcgactcactgcaacctctgactccctggttcaagcaattctcctgtctcagcctcccgagtagctgggattataggcacgcaccaccacgcccagctaatttttgtatttttagtagagacagggtttcaccatgttggccaggatggtctcgatctcctgaccttgtgatccacctgcctcggcctcccaaagtgctgagataacaggtgtgagccaccgtgccggctgagagaacattttaaaaggaaactaatttagggtcatcgtcttggaaattgagtccttctttttgagattctaatctgctcttttctgtaattttctgtaattacattccataggaggaacatgttgaaaataattgtataagaattctgcatcttttttgtgggagtccacttttagttttttctgttttgagaacttaacaggaggctggcccaagggctgtggcttataaaattcagaagatgctaggcaggatgctggggtgtcgttgatgatgatctcatccaaggtcttggcaaaaggcttgcccatggtttctggccatgccccatccctatctgagacacatgagagcctgaaaagataagcatagcagcttcttctcaaatggtcatgggacttctcaacccagtggcagagtccatgggtaaactgctttggtggtgaaatagttaaaaaaaactttggcaaagtgcttctttctcctgccttagcattagaattcattcgatgtaatggttttgacaatgccttgagcataattacagtgaaatatttttcccctctctacaccacagttcttacagttttattagagaacagtttcacaaaagcttttaaatatttattttcaacttattaaattatagcatgtgctatgtcatttttatgagaagggggtgtgttttcttaggatataagggagggaagattgttttgcagtataattaaaagagtattaaaagggaatggtgattagtgagtgcagtgcagtaacctgcaaaaaaggtttagaaaaaaattcagttgcttccattttgttcagtgtttttggagtaggcatgatgcatatttttcagcctggggcatgttgcgtatttttcagcatgatgcaaacataagcatctttttcatggtttttgtaaattagttggcatccccatctgttccccaagttctgtctgattatttgaatgcattttctctaagcatttccttactacttgttttccaataacctgctattttcttgggccactctcatgagcgcaccataggacagtcagctgtctagtctagtaaagcctgtcgggaaggtaaacaagaatttatatgcagaaaaaactatacccatagccatcaacttgggagctcaggacaaggaaccagtgagaactgagagcaggaggccctgatggaatcttttcagagccagttgcttgcgtgtaatgctgttacacattgtgtggttgtacatgtgtgtcagagagagggaaagacagctggttatgctactgaatttgaaggaattagcacttctgatagtgatgaatggtccaccctaaatcgttatttcttgccttgtatccaggagcatttgaaggttgaagtttgaggctagtttttggtcttgaagaaggtatagggtgaggagggtgtggagttgagcctcctaagcctgcttcctactttgagtaggaatggattttagacaacacagtaacttaattttctgtctccattatttttctttgcatatgtacaggatttagcattgatacttgcattatatgctaatgcaggttatcatgaactctcggtttgctagccaaagcagatcaatgattttgattgcttttaaccaggtttttatgatcttcaaagtagcatagaccttgaggtgcagaactctgcagatctaaaattcattccctaagagctgtgtagtcaaattatgactcctttttccattaatagttccagtttatgtgcctttatacagggataatctatgccagggtttctccatcttcagcactgttgatatttggggccagataatttgttcattgtggagatcatcttgtgcactacaagatgtttagcagcatccctttgttgtgaattaaaaatgtttccagacattgccaaatgtctcctggggggcagtcacctccagttgagaactactgatctatgcatgtgtatgtttgtggcatgtgtgtatgtcagtctgtcagtagaagttagactccatcgttttgctttactcagctttaattaaacaggtgcaactgagagctcccacctgaattacatgtacacctggtgattttatcttccctgctagtggcctattctttaccaatgcttctcacagtgtaaagtgcatttgaatcacataggaatcttgttaaactgcagactccaattcagtaggtctggggtgggcctcacaatttgccttataacaaactcccagatgatgtcaagtctgctggcccttagactgactgtgggtaacaaggctttaccatttacatgtcagatgtttcctggaaatgggatactgtttgaatattaactctgccaattgttgttcattattgatttatacccagtctgcagtaccacagcctgtattcctgacctacatgaccacccatttttttcaaagaagataccaggtgagagaatatggctaaattaactaaaatctgtccacatttctggggaacaaaatgactcaaaatgcataccatagttggtgggtcagtagctacattttcatgcaaaaagggcgttaaatgattttagttccaatttgtggtttttctcacacagcacaaagactaaaatatatatataatagctgccattctttacttagtgccagtgatgtgttgccaagcagtgagctgagtctgtacatctgtcggttctaattctcatgacaaatttacagggtttaggattatctccattttatagctgtgaaaattgaggctcacaaaggtcaagaaggagcaaagcctgtgcgatttccccacattatattgcaaagaacacaaaccattgcatagggctggtccacacacaaggatttttatcaagaacactctgaatggagaactatcaacttaaaaaatcttacttaacattgcatttgtattctttttaaaaagtgtgtatctctcagagcaggggtttttaaatgtttgttcttatatctgccaaaagaatgttgaaaaactaagtactccttttcacatttttaactggcatctagattctttcattcaatgtttaaatagttgtaaaaggatatattttaacatttgccatctaatgtaaaagtcctcattaacaaatcggacagccaaaccagtcattcaggaaaagtctgacttcatttttcaacctaacgaaatctgtaaatacatatccctctggtacccatctcatttctaaaagataaggcatgaggacttgccctgcattgtcctcagctgaagaaacaaggcactgctccatccattgtttggttctgaacctgttgctgctgctgctcttgctgctctgctctgctctgctctgctctgctctgctctgctctgtcctcataggactctcaggattaaggctttctatagttgtacctttgtctgatgccccagaggggtttccaacccaggaagatgcacttgataagagtttgctaagaagtttgttttgaaagtgttgttggaaaaggagaagtcatagaacacaaagagtataggtatgaatagtggacgtagacgttgatcccttaaatctctccatgcctgtacccatagaaagtctttatgtaccctcaggggtacatgtaccccagtttaaagactattgtcttggagtactcatattcatgttctagtactgacaccacagcattataggaacattcagtgaatccgctccaataaaaatgggttgtggaagctggttttatggacacaaaagtgaggtaattaaatccaaactggcttaaagcagtatcttattacagctttccgttagagtttctactatggctcagaattgttataacttactgtggtttatcactattattatgtacaataccagttccttattttttcaaaaacatcacatctgtcatcttcagtattctttggtactaaccataattctggttcttcattacaaatgatacactcagagggttttttcagtttttatttgcagacacatataatatatgtcagcacagatgtgtgcctatattttatctcctctgtgagacactgagtattagtaataatgcatcatataatacacatatgaaacacatggtatatctaaatgctataataccagtcatacccataataacttatattataattcttaccgcttttgattttatcttattttttgtacattacagtcaaccctactaaaatacagacttcttgagaacaggatgagtatcactgtctgattcatttctgtgtcctacagtgtctaccacaaagcacttatatgtagagggaaccacatgaattttttttgaataaatgaaagaatgaacaaatactcccttttgtgaaaaatactgtagcactgtcctaagtagttttattcactatttaagaggatgctctaatatttaccatgtacatgtttttaggcatttaagaaaatgaggtatgagtgggtttcccatcagtgttctccaagaacattattttctctatttcatagctacagagcctctagaaagaatcaacactgttggaacaggtccttctctcctttcttcagatccctgcattagaactgtatgtgcttgcttgtttgaggagaacagggttaggtggtaaacgtccacatcctagcccatcagtctcctttggctttatcaactctgctaacaaaggagtgactattttatgttttcctcagagtccagagatctactggacaaatatgtttgtttattacataagcaacattgtatcaacagcagtgacagtggaaaggaaatatctataatctgaccaccctaaaacatcaattatgtttctgttttcacagattgttttgcagtttttcagatgcttggtccatagaaataaacttagggtgatcatcaagcaataaaacgaattccacaagccattaatggtactgtattgtttctattagtttcagaaatcagcctgtaaatagagaataacttcagagtcagcttagcttctcatctgtctctttaaggaaacctatttttcactatgttcactatgtaaatcttgaatttaatgtttctgatgttatgaatatggcaagacttttattcatttaatatacaaacaacaaagacaatcattagtactaaggctatcctgagatgaacaggggatagaggatcctattctcaaagtgtttataggctaattaggaaagaaaaaggagatagttccagcacaattcagtaaaggctccagagcagtagttcgtaaccttttaggtctcatgacccctttacactcaaaaaattttgaggaccctaaagagcttttgagtgtatgggctgtatctatctctttactgtattagaaattcaaactaagattttaaaaatactcattagtgccagatgcagtggctcacacctataatcccagcactttgggaggctgaggcaggcggatcatgaggtgaggagatcgagaccatcctggctaacatggtgaaaccctgtctccactaaaaatacaaaaaattagctgggcatggtggcacgtgcctgtggtcccagctacttgggaggctgaggcaggagaattgcttgaacccgtgaggcagaggttgcaatgagctgagatcacaccactgcactccagcctgggcgacacagcaagactctgtctcaaaaataaaatttaaaaaaaatcatttgttaaaaataataaataataataaatccatcatctgctaaataacatatttttatgaaaaaatacttttacaaaattatttagtgagaagagttgcattgttttacatttctgcaactaatgtctggcttaattgaagacagctgtatcctcagatctgtttcacacattccattagctgtcagagaaatcatcacacgtcatggagcctctggaaaactccatatacacttctgagagaatgagagagaaaaaggttgtgttattatgaagatatcttcttcactctcaaagggggccacactttaagaaccattactccagaggatagacagttgaaacatcagtggcaaatttgtctttctctggaaaagcgtctggtttgggctgtcaccttgtgcttcttctgtcagccttttgcttcatcctgatgaagtcccccaattcactggcttagtcactgctttgatgtttccatcattaataaagccagtcacttgctaaccgtcaaacatagatgggagattctctgccttcaaatgttctctcccagtccacagaaaagtcctaaatgacaaaactgttttcataagacattgtgttttgtttgaaactccaatttgaaataagagtatggaaaccactaagttgcctggtttttataaatgggtccatccatagtgctatgcagttcagctgacatttaattcatttcagaccttgatgagacaaatacagtgacagctactatgtgcaaggcactgtacttgctatttgtcagttcttttttccccaaaacctgcctgtattcttgcacagatcagtctgatcatacttacagtattctcccagtaacaaccaaatagtatgatgataccaaagcttgtttggtcttaagatgtttgaaacagtgtaacagtcaccctagtcctaagtatgtaacttcattttgatgggcttaaattcctgtatttgttctcattattccagagctagtttaatacattactttttcttcctgatttaatatgttgattactaagcagaaaactgcatacatcacactcctttatttatttttatatctgctctcacagctagactttgatagcctgattatgattatatcccattttatcttttagcaattcttgtctaatacataattttaactgtgttgcgttgatagtagctgtgttcatggttaaataaccatggatttctagcagtttgcagagtaattacatggaatttattggaaagcttctttatttgagataaattttggtatcaggcctataatttatgtttccttgctttcctccctgctttttctatgggacttttcactgtttagtctaaattttaagagcactcataaaaatagctgtgacccgtcttttttattctgtgtatgctgcttccttgtatttcacaagtcaaaggttttctaaaaattacagctacagcataccatagccataatgtaatgtacaattcatttgacttagtcagcaagatcagtagaacagtaacactttttttggcatctgctagttgaatatgagtgtacatctatgtctgctttatgtccttgttactgaagatcctgtcatcatcactgagatcctttagagataccataaatgggtccagacccagcaatttgggttaatactattttccttcattgtgaaataagaattagggcaggaagttaagaaggaggctttagcttggtgtcagaggaatatatggtaaaaatggtatactgttagtcattactcttcatcacctgaacgattaatcttactaggccccccagaggtcaggagaagtgaaataagatggaaatagtcaaatgacccattaattataaggagcttggtagcttttagcagagaatcaggattctaaaaagcggtactgaaatcctcaaattgagcacaaggactggaattgaggcaaatctcactcttttaagagcagaaaaaggagcaaagtaactgagaaaaagggtctctgaaaggtgaggttccagaacaagtaaaaggccagtctgagggtccacaggcacagaacttgggtagttaggcagctacaaggagaatattttcatcttgagaacaaaggaggtgcccatgattctgggctagaaaagacactgtccatgctgctatgaaagggccaggtggagacttgaaaagatgctcaggctagacctggaagaagaaactggaactgacaggggagtgacaacaagtacagcacatgtaaatttgtaccaggataattactgcctaaataatgtgttttgacttctgcagtactgtattgttagggagctttctagtaagaacctttggacaatggatgttcatttaataccgtgaatattgtgcctctcctatcactcttttaatttttcttattaaaaatacctactcaaatgaagttttctttatgccgtttactcagatgacatctatcaagaaggagcttttaaaaagttaattactgtgaatacactgctgtgctagagagtctactcatttttctcacttttctttttgttttcctcccccaccccctgctcccaccaccactctgaattggggttcttgattatttagaaaagatcccttaaatcaaagtttcctcttttccatactttccattttgattgttaatacacccccgccctcccaaaaaaaattacctgtcttccaacagattaagactttaggtctttgtcagactaacagtttcaggtagatgtccccttaatcctccaaagcctacctgggccttccacagccatgatgccttcccctggctgccctgtccctctagggagaagtatccaaaaagccactcagcatgtgatgccttgtattatcacagatgtgtgtgtattcctgaaagtgcctcctagttcatggcatacagagctgcctttacacctagcattgtgatggtgctcctcctgggcttgtcctcaggttcctaatgctttcattgtttatcattgtctccattccttcctcccactctctgcagttgattttgtactctctgtgatctgcgttcttctgtatcttgtctgtttgcccaaggtagccttctttaagacagggataatgtcttccctactgcctgttccctattacccccagcaagagattgcagtaaacagtgcaggtggcagagggcaggtggaatgactgacagcatgtacactctctagtaccgaagcaccaataggaacgagacagtggaaaactatgagaggcagggcagggcagtgcagagcgagaaattcagactctggagttcagtttttgcagctgaatcccggctttccaacttctgtctagtgtgacttgagcaagcaatttaacctccctacaagtctcattttcttcatctgtagaatggggataatattagagcctccctcacaatagggttgttctgaagattaataaaaaacaatccatacaaaaagtccttatcatagtgcctggcacaatacatgtccgttctcattagaagtaggatggtgagtactaaaagagtaggttttagatgttctcaccacaaaaaaatgataagtatgtaaggtaacaaatacgctaattagcttgatttagccattccacaatatctagatatataaaaacatcatgttataggccctaaatatagttttaattttcatttaaaaaatcaaatcaaataaaaataagtgctacttgcttggcatattggaaaaaaaagtaggacagtgagacaacacagtgagacaacgtcagtcacaatgagctgacctaaagtaggggtcagctgggggaagaatagcacaaatcacattggaatgaaagatatgactacataatgtttattgcgatctattttaaggcttttcatggatcttttcagctatgcacatggttagtcataatgattgtcattttaggtcagagtttctcagccttagcattgttgacattttggttaattctttgttgtaggggctgtcctgtacactgtagggtgtttagcagcatccctgatctctacctactaaatgccaggagcaacacagtacctccagctcagttgtgacaactactgaatgtctccagacaactactgaatgtctccagacattgcagagaaattgagtctggttgagaagtcactgttttagggcataatttttgggtagactgttagattctttgtgttcgttgtctctggcctgtataactcttcttaattatctgctactcaaatgtatttgggatcagccactgtcttccatttctcttttgctcacagatctactccacagctcttctcccttcctggaagagaatgatgctgtgaatgtccaatatccaatgaaatgccagcatatcaaaatggatgctaatagttgaccttcccaaagcctcactgatgctctgctcatcttactcctgctcttcattttttggatgtgaatgtgtactttgtctgctgggtttagatactcatagacttggtctacttaggcagcggtccccaacctttttggcaccagggaccagttttgtcaaagacagtttttccatggacatgggagagggtggtggtggtggatggttttgggatgaaactgtcccactcggatcatcaggcattagattctcataaggagcatgcaacctagatccctcacctgcacagttcacaatagggttcacactcctatgagaacctaatgctgctgctgatctaacaggaggcagagttcaggcagtaatgctgcctcatcccgctgctcacctcctgctatgtgacccggtaataggcctcaaactggtactggtcttcggccctggggttggggactcctgtacgtggggactcaaagtctgggtgggttgactgggttagtacactgtatatactattcctgggcttggtttccatagtcaaaaatgtcaagtagactattaaggatattttataatttttttgactcttcagaagaaaatacaaagcagcagattgaaagataccctagttgtctgagaaataggtcatttggggttttcatattgttggataattaatttttcagtctattttgtgtacttttaactctttaaatttcaattatggatttttagattaaattagtattcctaaatatttgacacatatttcaaaatgtgtgtattaaaacgtatactaggaacagtcttcctcttaccacatcgttcatctccccaactgtaaccactgatactagtttctcttatgtacttgtagagtttctttatgagtacataagcaaacataaataaagattcttatgctctcccctttttacacaaaagtagcttacaaacactgttcctcagcatcttgttttttgcagccaaacatttcttggagatctttccattggatcagtgttcttaagcaggagcaggaaaagggaataaaaataaacatggttgctaaatacatctttacaacttcatgctaaagaaattaaactttgtaggatctatttttaatggaattaatatgtaggaggtatggaagacatatacttttgctgttttgaaattattaagatagattgtaacagtaagattatttgacttataacaacagcttgagtgttgtatatctatctttataatgtctgtgtagagcacatgcatttattttcttagttgaaaaactgaggcccaggcagattaatactatgcaaggccatcattatggtggccctggaactggtactagagtgtgagacttggcttataaagagaaggaaacaagcatattgaaggtctactctgtgccactagatctcacttaatacttatagcaactgtatgagctaagtattattattctcattttgcagatggaggagaaaccaaaaaactaaaatttacagaggttaaataattttccaaacagtacaggtaacagaccagaataaaaattcactggctgcgaagtctgtgttctttctacctaacaaccaggctacatgccggaaaccccagacaaaaaatgttgacctcagaagagtttcctcttatcccataccatgtttttggtgttcatttgttcattcccatgctttctgctccacccacttggctccctgaccccttctactgttctcctctttgctcactctgctcctctgcccactcaccagcttctttgctattcctcaaacagaacacggcatggtgtgcttttgtgctcgctgtctccccaggaaccactggattccccctcacctcattagtaccatctggcatactatattttatgtatttattgattactgtctctcctactagaatgtaaactacatgcaggtaatggtgtgtgtgtatgtgcgcacacacgcatctcattcaatgattagtcaatcattggtctattttgtttaatactatatttctggtagggaacagtacctggtacttaattggtattcaataaatatttgaacaaatacctcttctatttttgaaataggtaccatatttgaaagcatgggtataactaagcaatagacatatagtaggccctcctctctatagtctaggaataacagctagttgaacaatttttatatgccatgtaccgtgttagtcctgcaaacagtcataggaggcaggtattaccgtcttcttattttacaaataagaactgaggctcaaaaaagttaatttgccacaggtcctggtgagtaattggcagagccagaatgccagtgtagtttttactccaaatcctgtttctcaccccattacatacatccacacttcctatctcatatattatatctcatgagccatcctctccagtgaatttgtgtgctgtaatattctgcctgtcaaagatcccaaatcaccaccactagcaattcagtgttgtgtcacagtatttcctataggttcatggctactttgagccttgatcttgagacattagcaaatattctcttagtcattataataatatagcaagtttcgtcatttggcataaattcataattatttttggatggtttaaaaaattgtgactttgccagtaataacatctcatgttccccagaggtggtgggtttgtcataaataccatttccatagaacatttcaaggaacctaaagttcttggaaaatatttttaacaggcagccatttctctgacagacttcaagggcataataataaatatatatatatatatccttagaaatatgtgtgtatgtattttatcttattaagaatatttatatgtttttttattgctcacaatccatttatatttcaatgatccttttgtattttagcagattaaagaatccaggaatggttctttagaaaatcattccaatgtagctgttaaattttgtttttaacctccattagtcccttttttctcttcccaggtcacaggttattttcacttagatattgcacgtgggcattttggaggatttaatatgattccttctcttaacctctactcttcgttgggctgcttttctttcctttattctctcctttattctctcctttgtagaaagcatgtatccttttccagaacttattctgagcaaaaagttaaaactttttttaagcctgtgtttttttttttaaaggctttccttttttatgtggctttcttaccttaattgttgttcagttcaccacatttaataaaaagccaaagcaggggccagtcacgtaccagaatggataagttcactggttttcacctccttgtagtctggctgcctacacagaggcagtggctaaagtggtatgcttgggaaaccaaacgtttcctaacttgttagtgggaaattcaaacttcagaaatttagaaaccacaacaacagatgcctatgttttactgtgactactgaagtcacagtttgccatagaaacaggatggatagcagcctgaagagtataaaatgtgaaacattttgatccttagaggacttttttgggtcctcgattttagctgtcataaatcagtaaacaaggagcaaggaaaatagggaaatttaatacatttaagagtacttagaggttcaggcagttagaggatgagggttaatgtgtggcttggcttcctgctgagtaaacaattaaatcatgagccacagtgagcatcctacttctacctttacccactcttcctagttcctgaggatgattggtttatatcttttccatgatttttgcaaagtgagagtttgggccatatgccatctctaattacagacaggtggaaaagttttattctgtaatctgctggaacatgaatgaccatttttcttgtggtctgtgttttgcttgtcctcttgcatgctttgtacaaattaaaattattttggttatctgagccttgtttaattttcccttgactgtaagtccagagcatttgggttatgttttccttttcagcaacttctgaatactgagaagacagaaaatgcataaacagtctgatcatacttcctttcctgtaagttgggttcttttaagatgaacatgttctagaggatattaagcttgcatagcaaggagtaattccatcaaaatatgacagtggtcaacagcatatctgctagaggtgagagcaatgactgtaccccacttctcttggccctgggtctgctgcttatactgtccctgagcaggagtttcacccatttagtttatctatgtgagaaatgttctgtttgtggcagttaaagaaatggctatagtatacctcatgtatgtgctatttgaataccatccatttttgccctgaccatatcttaccttgtgatttgaattttaagagaaggcaaactatctcaggttttagtagctgaaaaaaaggtttttgaaaaaagctctggcttcactattcatcgctttttaaagtttactaattcacagctaaaaacaaagaaagcagaaccccaggtattaaacaattgaaaagccacatatctgatggacaggaaatgttggaccaaaatctgctagtgacttaactatctgaccttacctcatctgcttgtcaccttagctgcaacatgggaagagcagtgcaattttgtctctaaggtctacaaagcctttggcaatctcaaatctcagttccacaaaataaatactcccaacaatctttagagtcctttcctcccttctttcctatataacactgtatacaaattcacatgtcaagagattttatggctcatcaagtctcaatggttcaaaagaatggaaaaccgtaattggaattccatgggattcagatttatttgagtctgttgtagttcacaagttgtaagtatgctgtaaaagcaaataagtacttaaaatgttatactaaattcaaagtacaattaaactgaaaaattaacacctaggcaaaaagtatttagactgttaatttcaaaagagactctttattgtttgtggctaggatctgatataagccatttagcccaggttgtaaagatttgtcttacagatttgttttttgtgggtgcatggtaaaacagggagattccaaactagcttttaagccttttgcagtcaccagctctcttcggtcctttacctgctcaggaagttgtttcttacttcagatgagtaagacatttttaggaaagttcttgtgggtttctcacaggagggactgccttgtagcagggaaatcaaggtaaagggtaacctctccttacagagtggctaaggttaggcacgctagagacagatcttcaacaagcttaatcctttactccacttcacagctgggtgtctgagaacaggaattcttcatgactgcatcctacaaaggacctcctctttggcctgagacagccccctatatgtcagcccagcagcaccagatgatgaaggagcatcatccctatggatagactagcataaccagaagagtaacagtagctgctataggtttggcactgtgccaactgcttcatcacgtttaagcttcaggttaagaagtgatgttactttaagctgccttcctttctgcataagtccaggttgttctgaaggccaaataatgggtttttaaacttacagtttgggtgctctgatcttggcacaagccttatttgtcttttaacctcaggttctcctttcataatagacttctgaagaataagtctgccatcttttttggaatgctgcattcagtcatctccatttacatttcagttcccatcttttccatgaatgtttcttaacttgtctaaccctggctgattttccttttctaagtccccacagcccttacagctttattacctaaatattctacattattttgtactgctttctaatttgttttagtatattacttttgccgttaagccaactgtaagctccttaaaggaataatacctctgtatccctcatatgggttgaactctgtgcatacttgaccaaatgatagagaggtaaaaagaaccacttcctaggggagtataaccatcccttaggctgagtggtacctaaagttctcagaatgacttgttattagaatggaagaaggacaagtagagttttgttcctcttgttcttgtcacttctggaaggagaaccatttagtgaagagaagaattcacttggagacaaatttaattaaagtccagatggggaaaattggccagagaatcttaactttgcctgtgattctttgcatctgtgttcagcctaatgaattttattgaactgtaaaaagaattttatggggcagaatttggggggagattagtggagccccaaatcacttggcaaagttactctcacttttatttgaaagcctcaagaataatatgcgacttcaaacataatgtatttattttaataatatgagtgtttgaaaagtagataattttccttttagcagcagtggattcattttcacaaaattccacagagtaattcacttcttctgccattcccaattaacagactaacaagttaagactaagggacttccacaatatctcactgaatgggtgtttgtcttcagcaagaaaccagcaactttctcatgttctctctaggctcctggaccaggcaactccttccttttcttcaaatttaacaggcagacacttaagtcttgcgagcccaaatgtgatgttttacattccacttatgatctctgctcagagatttgtttttgttttgattcacataaaaaagcattttaaaaagaaagagaaaaacatatttcacctttaaacttttgttccaggactggtgggccatgagacacaataaatctggcagatttgcttctgtcagggcagcccatcttagaggactgacctcagccttgaggctgctttagatacagtgatttggagctctcacaggcccaagtgctacagctgtgttcatcttttctccatttacatgtggactctttccctcaaattaccctcattttctttagctaatttgtctctgtagtgatataatcagtagcttttatttttatattgtctcttctctacttgatcagagttcccatgagggttattgctcattattcaatctttattgagtactgagaaatacttggggtggatgacattgttccctttttgtaatttgtagaaaccaagggaacaggaggctcacccagtaaatggatggcagagctaagaagagtagaactctgatttatccacccattattcttactcttttagtctcaccgttgagacactaacatttatccctgtcaattcagtgtcactattcagcaaggttggccattgactatattctgttgaagtttttataagcattctcccacattgtttatctttacttagtttttatgtgtagctgatctctcctaccttcattgcattaccagtcaattaaaatagagcagggatgggaccataattgaagttgttgtccaagagctgctagtgatcttagtccttgtcattaatgtggtaccagtccatgctagtagctatagctgggttagtgacatggtatggtgtgtggtgaacttagttgctgggcctgttttcatgccttgtgcttagctcagtaaatgtttgctactgctgaggagaattataagccctaggctagcttcacaggttgacattggagtaactttgaaattaaagaaaaatcactcttctgtaaaatctgggagatacactggtttacccacagaaactttggaatgaagtacatgcttgggaaaaggcagtctgctgcatggcaaagataagccatttgtgccccgtaagtgcatcttccaggccttcacctgaggcacagagattagagaaattcagaggagtccacccttcattaaccactgcactgtgttcttccatattttgcttgaaggccattccatgcccccgggtgactcacctgatactccttcaccaggtatacaaagtctcattttattggggagggaattaaactgaggtagatgaagatgggcagaaaagcatctgacttagtctgcctatataacatacactgccatacaaagcagatttcactgccttgacttaagctgagcctaacttggtttctagttaagttcactgccttgacttaacctgagcctaactggtttctgtaagtcacttccatatggttgctttaagtagtggctgagatttgttttcagctcctaaacaaaatctagaagaaggggccctccacagcccactgtttgcagaaacactttttttttgtatcaaataagcagcttctaggttgtaatttgttcatatatttatccaacaccttttctgtcccagcaacacacctactaattgtacctcggtactttcctaggcactggaggtaaagctggttgtaaaactgaccctgaaggagtttatagtccaagagacagataataagcaaataaatcattaatgagtaatttaatgtcacatcacagtgcacagtttgaaggaaaataaagcagggtaagtaccaccaggagcttgtagccttcataggtgacttcctctgcagttttgggggaggttgttttgaaggcattgagtcactttgaattttgaaagggatcctgctagctgcggacgtctgaggagtgcaaaatgcttagctggaagatactaatagaaggtcatttgtcaagttagtggttcagacccaaatgtctttgaccacagagtacacagtctttccagggcacctctcaccttccaagtagagagtgggatttgccagccggaggacctttaaatacacttattttttattttctctttcctccctttatcacctcccttctgttgttgtagcctgattaaattgtattgattttcacaatgcttccttatcctttgcttttttattgcttatacttaagaactttgaacctttctactttctttttttaatggattttatatctaaattaacacctacagtactgaggctttttctggggcttctgttctcctctcttcctagcactaattaaggaaaaactactggtgagctgtagcccaagaatgcagggggccctggccctacctctgcatagctgtgtctctggggcaagtcacactgtggacatcagtttcttctgtaaagtgaggcatttggatcagatgacctccattgccccttccagctgtaaaattctgtggatattctgtgccaggactgtgtgtgtgtgtgtgtgtgtgtgtgtgtgtgtgtgtgtgtgtgtgtgtgtgtgactgtggggcctggggtatcccattttccatatagtcaagtaccttatcaaggtacttctcaaattcatagttgaatgtttgctgttctgatgtaatgtatgctttcttttgctgataataactcctttaggctagaataagtagttatcataaacagacacaaggagttgaggtatgtctgcatcctgtctgtcccaatcatacacttacctatctactcctctacttacctccctactgctcccctgcctgcccccacaaacacatcattccccaagcttgtttaaaaaaaattctatacttaacaatttatcatattttggagccagtagagcatagaaatgtgaggacggtcagactggaaaaagaatactgctaatgtgttctcgttcttgggctcagaattaaaactgctgctgtcctatcttaatctgctaaagcatctcagagaacaagcatgaagagggagtgtttctcatatctgaaaaagaaaccagggactttccttggtaagccttcccatttttgtttgcccagctttcccaggcagagacgatgttagtgcagatgaaggtcaaggagaatctcaagtctttttttttttttaaaaaaaggagggatgtgcaaaggctgataagtgttggtgataatctgctaggaattagtgtacctaacaaaatgactcaaaacatgaatgtcctacctcattttaagtagaaaatgaccagccataggaggttctaaaagtcattgcagcacactttaagcataagtgactgggttggtggctagaaaatgttgtggtgatgacagcagcaaccacagaaatattgctttgaaggtttgtgatgctggctgcatatgcagtgtctcttcatctttaaatccttatttaaatataatttacaaaaactaaacaatcagtttaaattgaagctgaattcatggtcaaatacaaattaaatggaccttaaaatcgtttaaaattaatatgtccaacagataaggtagggtgtattagatttttcaaagatgacaggctctgtgaacaacagatggggccatttcagttcctgaagcaggttgagaccaatattgccttacatccacaatatccagtcttttataaacagttctcttcttgcccctcttcctttttcctttaaataggaggggctgtatgttttttttctattcaccttgtaaaatgttcactttgccctgaagcactagacatggacagaacatgacctaagcagaattattggaatcttattcttcctcctacattttcagttttttttcttaaatctcaaaatccatttattaccaaaggcacttttttggaggggaaattacagcagagaacccttaaacaaaatttacagccttttgagaaggcaaattaatgggaactgcaagagaaccggaaaattaagtcaaggcttgatttgtgttttcatactggctgttactatagtctccatcacagcattaggaaaatagcacaaaaataccagggcttaacagttaaggttaatcaccacaaaagtgcaaatgaacttactaagcataaaattattatgtgctttatttggaagtgtagaaattcacattcattctatcaaaaacattttcccatcatacagattgtcccaaggactaagaaattgctcatccaaagagcccagtgtgagatagggtatccatgataagtcatacttagctttcagttttaaaagaggtcttatgtgattgttctttgaaccatgctttaaagttaataaatgggaaaaagtgtggaatattaaagagtgttatttttaaattttaaaaaatcgatgcttgcctgctttaaaaaaataaaagacactgggaaacacagctgttagaattttgatggaagttatgattttcaacagttgagttgtagtttatggtacagatggtactctgggtatacctgaaacaataattgatggtttctgtttgtctcttcctctgttagattcagaagagcagaatatcttttttccagagcaggaatttttcagtttccaattaccgcttatatcagataaacaactcttccattgcatattctgtacttctccacagtgacatgggtgttggccccgctcttctcattatggtgggcttccctaggtttgaaataatagtttgtggaaaatcctacttctcagtactaacctgcagtttatatagcctatcctcaggccaaataacatataatttttcttttaaaatatgaaaaccaaagtcgtgcattgctccaaacaaaattagcaaaaacaaaaaaactgctatgaggcaaaaatgataggcaccaatgtcatatacttttaaaaaccatccaacagaaattattagaaatatacagatataacccacattttgagtattttttaaatgctgtgtttcaatgataaaatctgggatctgacattttcttctgacaattaaatataaaaacatgagtttgtaacacacacatacacctcagtggttatagtgctctgctcctctgttaaacttttactgtacctccaaacagttatcttatatggtcattttagtgccaactaaaatgccagcattttaaaatctcagagtaaatataaatggcagcctatgaattctgagtttgaattgtatatacttataaaacatagagactgttttaaaagggacaattctgtcacatagttgttaaagttttattttacaatatatgtttagaccagataaggattgaatgatgaatcaatttttcatctcctattccagtgttctaaagttgacataacctttttatttttaattcctacgttgacttttagttggaaaaaatgaagtaaaatattatggagatttttctgccaagtgttcagttatcatactgtaagagttcattggtagcaatagcctcttcaggatttagatgtaactaattatggtttaaaatgttactgattaatacagttactctataagttttaccttttaaattggcattttttacataatatactactatccaaaatattactctagaaatgatagctgtaagtgaggtttgtcatttttccaatgcctggacttgaagcagaaagttagaactcaaaactatgatagttacttccttgtacaaattgacatatgcttttacgacaaaatagcgtttgtacgattttttgaagcttaaaaagattttactttttaagttagattcgtcttaattccaagatgtattcctaacagtgtttttctagtcgtttatattaacatttacaaaaagaggggaaaacctggcactaacaaattttcgcattctgctcatgtaagacaagcgagtttgagtccggaggagagatagggttgctgcagtacaatatagtctcccccaccctttccccaaagatttctcaatatgggcaggattcaatgtgtagctcacttggaaagcgtatgtaatacagtcacctcccacctctcaacatttaaaattaaatctctaatctgttttctcctccagagaaaacttctactttcaagttttgtgtgagttggaaacggttttgaacctagaattcattggatgcgctttgcgaaacctgtctgcagtttgtgatgctgagacagctttaacagccacccacagacttgctacctggctgtctgacagcagtgccccttggtggagcgaagttgctctcccgggcttacctgaactgcctgcgccggggccgggcgggggccgggccggggccgctgtagtgccgcgctgcgagccgactgtgcgcgctccgagagtcgcccgaacaatgcgagcggggcgctgagcgcgcccggcctatgggcgttacgtcactgttctgccttataaggcgctccgcgtgtgcggcgctgtcggcgggggcgccggtgaccgcgggaccctcggccgcggcggcggcgcagccacacaccccagctcccgcggatgttccggccgtgtgaacggaccgtggttcccggctcccagcggagggaatgagtggtgggccggtgggccggggcgccggcgccctcctgtcgggctaacaaagtcattgggaggcagggtcgatccgcttgtaacttttttccctctgggtccctaaagctgttgttgcttcagggacttcaatacacatcctgttattcttatgtaaacttttgtaaattcattatactttttatttttggttgctgggggtaggcgggagagggaaaggagaagtctggggttttgtggagacatctctgggggtgatttagacttcaaaccttctctttcctctttgtaatgagtaggggtcctcagaggatggtgttttatttcctgatgatgtaactaccaaacaattcttcaagtgatgatggaaaggccagatgaaatcttatttttttcagtgtttttcctgaaagaacttcctctttccccatttctgcatgcctgtgttttaacgaaagcagttaaaactatcattttttggcagggaaaaaatttttaaagaaattaaatgttttgtgctgtactttcaagacaatgtataaaattagaactttagagccagttttaatgtttgttctcttctaccggcaaacaaaataaagccaaaaataaccacgtgaagaaaaaagaaattagccaaatgtgattgaattaagaatattatcctctagtatggggtagatttacttgtacaaatcctacttcttgtgaatgagaattcacctccgaattataagagaagtcatacctaaagttctagcccaactatatgaatctgctaaataaattagggacgtggcattcttatttgcaagcttcagatgagtaattttagtagcttgagtccttttaaaacctcttttaaaattacattaaaataggattgcttcctattatgatgtacatatgtctgtagaattattgtttccatatgttttgtcaaacaagaatgacgaaaatagtctgctcgcttcattttcttagtgtggagtggagaaaggatgtttgcagagttgttagtggaaatggtgtggaataaagatgcagggcacaacattaaatgtatgtcctcttcactaaattgggagttcactttatcattattctagatcactctaagtacctactgagaaacctaaagtaaactcactcttgcttttcatatacagtatactaagagatgtgaattacacatactcttcagccgaacttaaaatttaatatttgatttgcaattgtgtactaacattttggatgttgagtttgtagttttgttggttttaactcttctgccctatacttgtgaattgcattgtaatctttttagtctcctgtgcttacctcatacttattaaatatcctttttgagacttttatgctgcattttttattacaaatgagattaaatgacttttatgaaagttgtatgatgcataaacacctgaatctcagccccaaactgatagcatacttttaccccaaagctaacagttttgtagcttgttttgcatctttttccctctgataggcaaatatgtttcctaacatttaacactaccatttgtttctttctcacatatccatactcaagttttgcatttattttcattcttttgacttgctggttcccatgaaatatgttagtattatttcctccttttctttagctatattctgaagaatagaggaaagaggattagggcttctactccttgtatgcccttgcctggtacactacttgcctggttacattactaatgtgttactcctgaaacatcagtctcttgacccagctatgactcagctttccaagtgaggtcatagttatgtgaccactgtcttcaggaaccaatattaatagccctcatttgttgagcttttagatcatacctaccaccatacttagtgctctacaagcatttcatcatttaatcttcacaacacattttgatgtgatatgatccattcttttcagataaagacatttagaaggctaaagtggcttgaccaaggtcacaccgctactaaagtaatgatacagggatttaaagcaatgtttacatatatagccttctacatatatagtcttacatatatagccttcttctacataaatagtcttgtcttctcctaatagtttgttcagaatctctcagaggtatgtttggtaaaggagtgttcagatttaactgagaagtttctgtttattttctagactgaatcttgaactgggaaagccaagactcatcctcttttttgtggatttgtggatttactgacagttttctggaaggtggcagcaacgtatcttgttctagtaaaattagaatatcatcaccatttcacttcaaacgaaagtcaagggttttgagggagcaggacctttaactgatacaagagtaccctgggtggtgtattgcaaactccaaccagctgttggcattgtgcgccattggccacataagtagatgagtagacttttatttccttccctctttcaaccaaaattctttctgagatgtaatttttattctcttggtttctgaaattttcttcatttgtgaaattctcttggtttcatttgtgaaaatagtagagttatgatcactgtgcctcaaaattggatgagagagttttacttcctaaccttgttctgtccaattacttttgtgactttcttttcattttttaatcaggaatttactacaaataagcatacctagacaccaaggtcctttctacaattagtaatctgagtttatgatctaaatcagcactagctttaaactgttatttagaaatgatacaaagaaatttttctaccaagttcattgctttctaatgcgggagaaggggtttgtaggtaacaaggcaagaaacaaggagataccaactagatttagccatattatattatgtcaaagacagcttaatatcaccagtttccctggttcgagctaattgtcaggaggccatgacaatgaccacattaacaggtgttattagtgaagtcagttgctactgaccataattacaacatcatcattatttaacttttaaaaaataccattaatatactgctaatcacatcaagccagttcctctttttgaagtaactgctcttattttctttcatgtcttctctccctgcctttgtttcttcttttgactggtcatgtctttcagtcatccaagtatagtaagtgccaaagaagcagtaattaataggatgtttcttgcagctacccaaaattttcattgctggtcctttggtcatttaagcagttggtacgctctgctccctaggagctctgctttgagctatgagatggtaatgctaactttgtatatgacatgtttgcttctttgcctctgtgagatagtatatatggaaacactgtcatgtacaaagaaaaacagcaagacctgtataagacctggtcttatggacctggtcctgtataagaagctgaacagagtgggaacagacccaggattgcatagggagaggtatagttccatggtcctgcattgcttcagactacagttggattggccagaatatgagctttcggtgtttattgcaccccacgctaccttctaccaccttacccacagccttcttgcaaagcagctttgccactgagcactggataaccttgccatggatccgatcctgtgcttctactctccgatcccttctcctctgctgctacacaacttaggacgaaggctgaagggacctgtaggcaactgtgaatgtggagccaaaggggatgtctgtggtaaaagaaccttctctccatgccctagacaatcatttttctaatcaacctcatttcttcactcttctttcactcttctttcagttctttgggtgccacctgtctggctctgtacatgtagatacccacatgaaatataccatatctccgcacttaaactgtacttaaaagagcctttaaccagcagaccttaatatacatataaactgcagtaactgaatatatatatgaactgcaggtctatatatatagaccctctttacttttatctgtagcctgaatctctggtcccaggcctatatatggtccgcagagtttccagaaggcttccaattattctgctcatacttcagctgactatgactctagaacagtgacatatgtaccttgagaagtgattacagtagtagtgtccatgtgatgctagggaatgggaagtcctttgttattaaaacattaaaatgatgatattttgtggttttaaaattaatttaaaatttttttgttttaaaattaatttaaaattttttttattttaaaattaataggcacccttcataatttggaaaatgcataaaagtaaaaaattttacatgtagtcctaccacatgaatactgccaactattaacaattcaatgtactgtgtttcttttagtctttttctaagcatttataaagcatcattttcgtagtgtggatggaccctgtatgtgtatgtatatgtgtatgtatattatgtttctttttgcctttattatatatttctgaatcatgttagtggcttttctgtagacattgggctatttaaaagcgcatgtttacatattctccctagcattggtggtcacaaagccaactactgcctgttggccccctaacattgccacggtcttgttcctcatcaaacaaagcaaggaagtctatttaataaggaatcatctgttggtaagagacttcctacccttggtttacaggggatgccataagttggctatggactctagtgagcatactagtaggtaagtagaatgacttagaaagaatgaagaattggtaatgtgacgccactgtaagattattaaatgggaagcaggaaaagtctgttacttaggtccagtccatttgcttatttattcctacaaacattttgtgtttccttggtaactaataatagttttgagaaaatgttgaactcacaagtattactgcagaagtgaaaaaaaacccccaaatcacagaaattagagacggaaaagacctattaggtcatcttccctgtcccttgccagtacagattgttctcagtgctttgttcagtccattttttaaagggaccttgtcatataatttgtagcccatctctctctctctttttttttttttgagacacagtctcactctgttgcccagattggagtgcagtagtgcaagctcggctcactgcaacctccgactcctgggttcagacagttctcctgcctcagcctccctagtagctgggattatacatgtgtgctaccacgcctggctaatttttgtatttttagtaaagacggggtttcaccatgttggccaggctggtctcgaactcctgacttcaggtgatctgcccgcctcggccttccaaagtgctgggattataggcgtgagccaccgtgactgacccatttcttttttaagtaatacatttttaaagaaaccactgacagattttcccatgtagatgtggagcttgatttcagggtaagtatttgcagagaaagacctgtggattcaaagtacaattgaacaagttttgttagtttgaagtcattggaatagtttaggatgtctttggaatagttgaccaactaagagtagaacagttaggtaaattggatttatatgttttcttttatctttggaactcaaatagagcaattcctgagcataaattttaattataaacttcaagactcattgaaatggtcctagaaagcctgagaaaataaagcatccaggaagtaaaaaaataagagtaaaactatttcttctaagattatttttatgaaaattacattttaaaacgtccctttcggttccaaattctgctttgtccattatttatgtagttaattgcttgatatgaaggtggcttctaattgtaaaatcctttccttttgtctggcaacttcttccagactctagaaggacaaaataaaactgtctcatataagcagtcagtggtggtggtaagactaaatcttccacttcctcatataatggctggaaatgtattcactgagaaaaatgaacaaattaagagtaaaaggtgtgcttagagttttattaagaagaatgatcctttcataaaatcatattttagggtataagaggccttagaaaacatctgatcttcttattgccactctctgttcccatttttaaatagatgagataactggagctcagagaggttaagggacttgccccaaggtcacacagtaaattggtgacccagtcactgtgttttctgggactgaatgtttcttttgggaaacatgaaaaaatggcacaaacagtgtgattagtatctgaaatcccaattaataattgagtaatttacctagcttatactaactgcaaaactaatttggaacattaatgagctagttgtctactttatggattagaaatgttttcttttgttgcatttgttttaaattggagatttatagattgctgcttatcatctcaggccactaagattggccacatgtcaaaaccctaatggagatgtctgaacttttaatataaatttctgtgttatcatgtaacaccattatcttgcatgcttgccaattgggggttctgtacatgagaaattctattataatttatgtcactaagcatccagtctacatcataaaatgcaggtttggaagatatgtcaaaagtcttgtgtctacgcttagattgaattatctctcaaaacttcagtgttttatctaagaattggtacatgcacagtctagttgttattaatcagtgccgaacagctccagagattttttacttccccagcaagtccattccattccaaactgagaactggctgcttctaacttccactcattgttcttcatctttccatgacaccatgttgaataaatgcgttgctttgacataaaagtcttttaaatatttgaaaagtttgtcttgagtcttcagttattcctatattatatcattttagtcttttcacaccctgtgtccaaaaggttggtgcttagaatgaacagattatttcatcatgattatttcagcattatcagagttatcctccccttttataggctatgtgaatgtgtgtgttggctggggggtgttgtataaacagattttcttaccattttagacaaccatatcacactgttgagtcaaagagcttactgatcatcagtcttctaatgaacaactgcacacccaaatgttgtcatcatgtactgcttctgtgataatctaggataatcacttctatactggttttgtttgtatgacttcattgttataataataacaaaaacaataataggtgacacatttaatgtttaattgatgtcagacactacacgctttacaaatagtaacaactttaatccacataataaccctatgggatagataactgaggaacagagaggttaggtaatttgtctaagatcacagagctagggaatgatggcaccagagtttgaactgcatactgactccagcaacttctggggaaaatcacactcagtgttttgtagtaagatttggatttagggggtaaacagtactaacagagagttacagaactttgtacttctctcatctgctatttagttcattggacttgaactatgggctaggagagtgagaatggatcttggagattatctagttagcagcccttatagttcatggaactaagacccaggctgtgcagtagcctgttcagggatatgcatatgggaaaagctcaagccagaatggagtgcttttttactgaagaattctaaaatgtttctgcttcatataatatcctctctctgtcctttttccccttctttctccttgtcttctctccctttttatttatggtgctatcagtgttagaacaacaataatagaaagtacatggaaaagatcacttaaaatcctaccacaccatgttttaaactattttcatgtattgctgatttctgaatctgttatcttgttagattatgacattgatttaagtttcatagctcaaatatggaacctctataaagaagttccagggagtggaaagggaagggaaaggaattgctgttatttattaagagcctactgtctgtcagtcactctgcctacctgctgtctctgatgtctcaaacttccttcccactttatgggattctgtaggaggaccagcacaataccctgcacaaagtgagcattctgcaaacctaaagaacgaggaaatgaatgaaaggaagtgctttgaattcagcagaagaaagagataacaatcatgtgcgaactactcccagctattgcctattgactgttagctttcagttcatttttgtacaatttaaccattgaggcaaatgtgtatacaggataccatggaatgctgtttacaggtatagattttggttcttgtacttttgaagcagctgaatactgataaggcctgtgtccagaaactatttttttccttcatttaatcaggtttctttacttccttgaccacaaatattatttgctaaggaaatttcttctttggggtggtatttaaccatgcaagtggggaaaattgtgctacgatactgttctgacagcctgtggacttgagggaaaaaactgcaggagcagagtttcctttcagcagtcaactataggctcagtcacttcttgacaaaacataagttaaaatagtgctgatttctttttgaacataatcaattctaatggaaactgttccagctgagtttggaaacacacagaagcagccttcagttaccattgaggctattattgccctagtaataccaaagagactctttcagcctacttatttgtattggatgcttgtagggctatttcatggggacctggtgttgactctcagtgacttccactttgactctgagatttatcttcaaatgctgatgcattctaagatttatagaagtacaaacttatcttattattgctaatttgtcccattactagactatgccccttagagttataattatgactagcccaattacattttattgtcgtgcccttttttggcaaaaaataaaatttctttgttaaactcaaggatttaaaatttagcacaagttcataaacttactttgatacttcttcatttcctttttaaaaatacatcagtagactcaaaatgtaaaagtggcttagggctcacttgacctctgaaaggtggctgactgacttttagttaaaaacaatatttgtctatatatctctgtcatctatttgtggctactatgtgttgaaactttgtggaacagatatctttctcccttcttcttccctcctctctgcccaaaagacacacacacaaacacacacatgtacacacagagacttgaaggcttttgtgtacatttaccaactactacaacaacaagaaatgaagaacaatacagctcaactctgtaaatctagaatggggaatctatttcccaaaggctgtatgcagtatcttttcagcgagtcatggtagcctccaacaactagtagcactctttgtgcatgaggatatttctgactaaaaatccacctttgttgataatgtttgttcactgtaaaggaattgagtggataaaagaggtattacactttcctttctatatcaaggaaggtggaatattcaaacagaacactctatgtgtgcacacgtgcacatggacgtgagtgagagatgatttatagatatagaagagtcctactgtattcttttaagaggtattcagcaactatttgttgaataccttctgtgtgtttatcactatgctgagttcctggtgagaggggaatgagtgtaaagcagggatgttatcactatgctgagttcctggtgagaggggaatgagtgtaaagcagggatgtccaatcttttggcttccctgggccacactggaagaagaaatctcttgtaccatacataaaatacacttaacactaatgatacctgatgagaaaaaaaaaaatcggaaaaaaaaaatctcatgttttaagaaagtttatgaatttgtgttgggctacattcaaagctgtcctgggtcacttgcaacccatggaccacggcttggacaagtttggtgtacagcacattcctgcccagattttgggggggtagatagaacaaacaaatgaacaaaggcccaaaaaaaaattaacattaaattaagatattgagttgggtgaagtaagaatattttaaaaatatcagttaggtggccagcgtggtggctcatgcctgtaatcccagcactttgggaagctgaggtaggcagatcacttgaggttaggagttcgagaccagcttggccaacatggtgaaacccatccctactagaaaccagtatctaccaaaaatacaaaaattagccaggcatggtggtggacacctgtaatcccagctactcaggaggctgaggcaggagaatcgcttgaacctgggaggcagaggttgtagtgagccaagatcatgcaactgcactccagcctgggcagcagagggagactccatctcaaaaaaaaaaaaaaagtactggccgggtgtggtggctcatgcctgtaatcccagcactttgagaggctgaggtgggtggatcacctgagattgggagtttgagaccagcctgaccaacatggagaaaccccatctctactaaaaatacaaaattagccgggcatggtggcgtgcctgtaatcccagctactcgagaggctaacaggagaatcacttgaacccaggaggaggaggtcgcggttagccgagattgagccattgcactccagtctgggcaacaacagcaaaactccatctcaaaaaaaaaaaaagtatcaggcttagaaatatctggtagatcttcatcagaagttaaagttcatctggaccttgaagggtgagtaaggcattccaggaaggagaatggtggaacaaaggaaccctggatttactatagtcattggttggctctcatggagcagagctgggcctctgcaggcaattgtgcatgtggtggctatcacagccatgactgagaggtcacataagatggatccaggctacgaataggtcttaaaatttaagtagtgggttctgggttttaacttcatgttacagacagtcgggtgccatcagcagcttttgagcagttgaataacatgttgaaagcagttttaaatgaatcatggcattgttagaaaattctttttcaatttcttatataagtacaatatatttatatgaaatggaactgggaatacccagatatacatataatatagatatggatatgatgtagatattgagatagggcctcattctgtcacccaggctggagtgcagtggcacaatcacgggtcactgcagcctcgacctcttgggctcaattcatactccctactcccacctcagcctcccaagtagctgggactacaggtgtgcaccaccacacctggctaattttttttttccataaagatggggttttgccatgttgcccaggctcatcttgaactcctgggaaggttcaagcaatccatccaccttggcctcccaaagtactgggattacaggcatgagccactgtgcctggcctcctgttgtatattaatacttctcttaggtactatcttcggacaattggtgatgtggagcagcatctattgaaaaattttaaatgtctgctctgagaataaaaataaaatgggtctatgaagttgtaattaaataggagactttattttgaacttattaaatattagaatagctgtcagagggccaggcattatgttgtgcacctgttgctacttgggaggctgaggtgggaggatcacttgaacctggaaggttgaggctacagtgagccatgatcatgccactgcacttcagcctgggcaacagagtgagactccatagcttaaaaaaaaaaagtgactgctagagaatggtttttgagccatttacttgataagtaattatgatttaccaaaggttcttcccagagaaaagttggtggctgggtaaagatctcccaggctacaacaaacaaaacaaaacaaaacaaaagcacccctgaatattaatgagttggttcgttggttggttttgtagaggtgcctgtttgatccatcactgaaaatagagagaggctctttatgttttaggtacaccctcctaactgcttaacctatcaacaattttatatactggctgtggaaggtaaagtagagaaaagaatcttcttagactgctttttgtagagatatgaacactttatcttcatttttctctcttccagcaaaagaaattctataaccatctttgttgattcattttgatgtttcataaatttccttgcaaaaaaataactctgctaagaactttagcttgtctcttttctctccatgatcttattgggctttcatctctttacttagttgtttagaattgtgcttcttaatttttataaacatatttttaggtagaggaagagcatcttttttgtcattgattacattatattcagagaatttgatcagtatgttatctatcctttgacattaaggtttgtttcatggcctcactacatggttactttttgttcaggttctctatctgcttgaagataatttatgtttcatgaaacttaacagttttctgtatataaataaagcttgttaattgtgttgttaagatcttctgtaaccttactgatttttatctgcttggtttattaataactaacaaggatgtgctgtactctcccactgtgatgatggattagtttgtccttgtgtttctggcaattcttgctttacatatttttagatgcacacaaattcaaactgttcctaggaaatggaatctcttcatattatataataaccctttatagatgtttttaactttaagttcattttgtttgatattaacatagctatataatctttcttttaattagtagttactaatgtcttttctgaccttttactttcagctttaccatacccttatgttctggtgagtctcatataaataacgtatagctaggaattataattgttaaaattgctttaatccagttttacaatttttatcttttagcaggatcattttgtctatgtttatagtaattatttgctgtcttatttgataattccatttgtaccacctttttgttgcttttatctcatttcttggcttcttctgaattttatttttatctatttcctctctctctctaccttgtaatacatactgtattcctattctattagggattaatgaccctataaattccatctcacaagttaaattctcaaaagtctaaagctactcagtatattaatcctcctccaaaaaaatctaaggacttcaaaacacttttaattctgagcataccctcccagtttttatattattgttattatatattttagttctaactttaattccataggacattataatctattattgttctattaggcaattattggtttagatataccaatatatttaacactttcttcgcctcttatttcttcttttattccagacttctctctgggaccactttccttcaatctaaatgcatccttttgaagttcctttagtggaagtctgctctttgcacactgtatttatttgaatctgtctttatttcaccatcgttcttgaggatttttactgggtatagaatgcttggttgagacttgttttctgtcagtacattgaagatattattccaccaacttctggtttcccattttactgttgaaaaatcatctatctaattgtcattccttttttccctggctgtttttatgatcttccctttgtctttgatattatactatttcatttgtatgtacttaaatgcagatttcttttattttgtccttaccaggtttcattgagcttcctgagtctgtagattagtgtctttcttcagttctagaaaattcttagtttatattaacatttcaaatatggcttctgaacagttttttctctccttaatctcttataacctagattagacacatgttagactttctttatcttcacatcccttaactactcttcagttattccatctgtttggctttccagactatattctgtgcaatttctttgaatttttcttccagtttactaattctcattccttgatctacagttgttacctatttcatttcccaaagtttctatttgtttttctagtttgaccattttctatagtcttttactttttaaactagaaataccaatccgctgtttttttttttctgacatattaagtatgtcttacatgctgtctgattatttaaatatctgaggtctttgcagctctgattctgccatttaatgtcactggctttcaataattgtatattattttctgtatgctttcagatttttttatatgaagtcacgtatctcagaattttatatgtaggaattccttgagccctgagttgaaggtagtttcctctagagaggatttccatttgtgccaaatgccaaaggggtattttcagcctaaaatctttttaaactgaattttttgacctaggatctttgggatttttttcttttgttttgtttttgtttttttttcagaccacccagttagtatgaatctgcaaattctcgtgtgggctagcttgttagtataccttctcagtggagtttattttccctctaactcccaatgccatagttcatggaaagcagttttccttgcagtcctttagaggttgattttgtttctaaattaccctttcgtctgggtaatgtgggtacttccatctgggcattctgacagtttagctctttgaaatctcagctttatgtggggctgggaggaccctgggctttgtactctgtctacatgccctatgatgtcatgaaaactaaaatttaagtttatggagtttaacaaaacattctcaaagcaaaaaccagcttttgtgctttgctttacctttctaggttttcacttttattcagtctttggccttgaatattcctaatattacttgccatcttatagatgtattttttgaaatattgtatatattttattttgctttttaatatgtgttggattttttgggttttttttgtttgttttgttttgttggtgagacactaggttagggtagctaatccatttcaccatcagcaatggacattagaacaataataatctcataccgaaaatcagcctgaaaactatgtctaaaaggaaatatttcaaattaagaaatggagttttagcttaacccagtacagatttacatcacagcatttccattcattgctcagcttactaataagccaccagtgatttttcagttgcctaattgtataaacattgtgtccaagataaggtccaactattaacaaaactacactttttaagttctagtcattcttaggtctacatattaatagaagaatcagtcggctatctagaatagctatgattcactaacacttattagttaaatttatattaaatacaatataataatttttctgattttttcacagttgttacttcttagttcaggcaaacacattagtcagagcctgatgtaaagagggatggtctaagagcttctgctatgcttttaccaaacctctgtgagaaatagaatatcactggagtctcattccagatgcttcaaagggaaactgttcttatgtgaatgatgccactttgagaactgcatcttgaattaagaagtttttcatagtgcactaggcaagtctccaattttgtatggagaaccatgtaatgtgagggcttcacatctttgaagaattcccaggatatggcaactttaaactattgaccttcactgagaactgtcatgaaaatagtgccctggcttctccaagtggtctagaatgtgagtaaccaaaaaattatactttgtctaggaagtgtccagctgtaatcatccaaaaacctgaactcccattggctcaaacaatagtgaaatatgtcaccacacaacaaaaaatccagccttgtggcaggttctagacatagcatgttgcctctgactccctggttcttgtggctttgatctcttccctttgatggcttcattgtcacactggtagcaagatgacctcagtagttccaggcatctcatccaaacctgcaacacccagaggtggagaaggtgccatctcttctggtgtctctttaggagccagtaagcctttcccataactctcccccaattccttactccatctcacccaccctcaaaggcttgcccttatgccttattgtctggaactgccaaagggaaagagaatgacataactagcttataaatcaatcagattttatccttgatctaaacataggtcaagttcatgtcgatcatgtgggcttaatggattattctaagttatcttttacataaattctaagcgtactattggcctgtatttttcttcacaaagaagatgaggcccctgttggtgctgatcccccaaaacagagctgaattagaagtgatcaggacagtgactggaggaggagtggcaatgccttgctaagatgcaagcatgatgctctgtgtgtctgttctctcaagtgttactgggaagaaatctggggatttttagaagacacctttctgctttcaggtatctctatttccagtaacaaaattggcatctagactttttttttttttttttttttgagatagagtctcactctgttgcccaggctggagtgcagtggcgcaatctcggctcactgcaacctccgcctcccgggttcacgccattctcctgtctcagcctcctgagtagctgggactacaggcgcctgccaccacgcccggctaattttttgtatttttagtggagacggggtttcactgtattagccagaatggtctcgatctcctgacctcgtgatccgcctgtctcggcctcccaaagtgctgggattacaggcttgagccacctcgcccagccggcatctagacattttttaataggcatttagtaacagtaacaaatattattgttcattttatagaatttgaagtcttctcaatctaagactagattttggttttttaaggtatgaggttttatggatctttttactatcatgtaggtatctaagaattacatcatttgtttgacaaaagcagatagctaattcctttaaagttagctattttaaagtaatcttcaattgctttaatctcaaatcatttatactctacagataatttatttttctgtgatgagcagaaatagtttcatgctgattgagaatgatttttgtttgccagcatccctttatcaaatatagagatacttaaaaatatctttaggttttacttccctccaccccaacccaagacgttttgaaggtaaaaaatctggctccccctttgccaaatccacaaatatttctgtgagttgctctacagttttcttctttttgaagctgggtgtcaagatattcagtattcatttattaaggacctgctatgttaagtgagatacattttggaggaggaaggccagttaacatagaaccagcatataatagcttcagtaaattttctttcctctctgctatgatactcaaagtttttttgtgatattgcagaaagtaagacaaatctcctgctttaagacaattacagctaggagttggttggagaggtattaatagaaaaggagataggatggttaaaaactaagtagattgcataagatacataaataaaatactctttcagtgctaagggagaagatctgtatctgaaaaggtgtaagagaaggtggcacttaggagttcaggtgaagatctgccccatttgttcatctgttgtgggtgcctaacaggagctagtctggtgccaggtctggccagaggtggattcactggccccattagctttgtgtgctggtgtgctattttcttgtttccacttttagttgtcacctttttgttttgggttggttttttgatacttctaaagtctgtgttgcttattatttcttttgctcatggaagaaatgtaggataatgctgaatttactctgaatttagatcttagggcaatttgctttcttacagcaaggaggaaagtgaatactttaattttttaaatgtaggaagtttactatcttgcagaaagactgtttcaagatatttcctcataaaaacgatattattaattatggagttgattcccagactagcacaaggaagcttactcaacccataataaagctgaaaactccatttaggtaactgtgatagtatggtgattttgtagcacaataatagcataattcacaaggtttatatgtactcctattattacagtacggagtagagaacaatattcttgcaaacgtatagagttcaagctatatttaggtcagctagctttttgtggactagctgggaccctatgtgttacacgaaacatgatatttaattaacaaatgtgttccaggttcccactttggattccaggtgaatacctccctgtcacatccatggcagcctcaggccaactaacctgaagaaaagtagctctggaaatactcttgccctccaggtgccatccttcgaacagggtgtaggctggctttttatatagagagaatgttcacaactcaggtgttcataacccagagaatgcttatatatatatagtggccaggatggttaaacttaactatattttattcttagctgtctcaggttcaagcatgatagcatgttcttttaggcaacttgcagtcacccatgttcactgctggaaaagctgaaaacatccctctttaaagaatgaatcataatccaactagctttgcagttggtctcatatatttagtgagctttcagtcagcaggacttttttttttttttttttactatgtatcccataacatatgaatggtaatatttgtggcttattcaaggtactgtatttccttccgctcatgggcaagagcttattttttggctgatctccttttgcagaagaggccaagttcctggtggtgtttgctagatatagtttagggaacttagttcacaatagcataactatgaacccatggtaattttttttaacctatagattggttttcgtataccaaaaggggataatcagtgcagatcgaaataaacattcatttcttatcactgtacatgtaataccacacttccacatgttgtcttccttaatctccttcatctttgatggaaaacctcttccttttaactactctccatcaagttttctgttgactcaggacaataccctagcagccttcacccatagaataggtgcctccttaaaagactggttaaatgttggctaaactctagcagtgattgctagaaaagaaaacaatgttgatgtttggtcagggctggacaaaggaacccatcatctatgtttggtcaagctctaagctgtaaagatagtctttttgtagaggagacatgtggctcactggaggagggaaccatttgcttctgcagggaactgccacggttccatattataaagcatgagtcatggatgtctttgtgattacacatccttcttcacatatgtggaataaacttttagaaaaaaaaaaggaagttaagggaaaacagaagtgtgaataactgctaatggtgctctcactggctccattccgtctgctatttcatgatacataaagggagtaggtcagagattcctttcctggcaaataagtggcaacatatgtttgaaacagtgaatggaaactataggaggaaaatgacaggcatatgcaaaaggaaggcaagggaaaatttgttgccctaatgttagccacataattggtatgcttttctagagagaggctgtttcattttaaacagtctgcatgccccattagtacagcatttctgtgtgtgaagtgtatatattttctaggctttggggattttggtttttttcatgaatggtagtcaccttaagctactgaggcttcatacagagtcctttgagagaaaggttcccaaaagagaacgtagtcaggaaataggaccctttattaaagtagtaagaacaaaaagagaggaagtagttaacaacaactattttgatgggctaagaacaaaggaacaggcaccaaattactatcttctggagtgctcttcatttaaattataattctacaatgatagtgttgattcatttgttgccatagcaaccgaacctttgttcagtagagttttgagattctataaggttccagaggactagggtttaacggtttttgttccacaatatattcataagcaatgttgcctactaataaattgaaagcacagtgattttctttgaaaaaataattttcataacaaatcagtgtatacaacgggtgctgaagtccatttccactcacctgtcatacatggctaataaatagaaaatgtattttcagtcgcaaaatttaattatggccaattggagaaaagtgctagagagaatgatttgtttctcagaacaaatttttttttctttctttgcatagaaatgattgtgattaagaatattgtcaacttttggccaagcatggtggctcacgcctgtaatcccagcattttgggaggcagaggtgggcagatcacttgaggccagaagttcgagaccagcctagccaacatagtgaaacccaatctctactaaaaatacaaaaattaaccgggtgttgtggtgcacacctgtaatcccagctacttgggagactggggcaggagaatcgctcgaacccaggaggcctccgcgggaggaggttgcagggagccgagattgcaccattgcactccagcctgggggacaagagctagactttgtctcaaaaaaaaaaaaagttggcttacttgttctatacctttgacagtaaatacagctcaaaacaaagctaagaaaaacaagtgaaagtttgccattatatacctcaactaatttgtgttcatttgcctgacaccaaattttgaattttctttactagttatttttttagatcttgagtagtctatattctctaaggcttaatattattgccaagacaatgggatgccttatgatggagtgctggggtatcgtgtatttgaggagaaatccagaatactgaaagtagaaaaccaaaattgtgtttttgagatttgggaagcaatgaggttctgagctggttagtttattatattttttgtcataccactatctcatattttaccttgaccagatggggatgtccaggatggatgatggtgatcatagagggattctgtaagagaactccactacagagaatctcctatagtgtgtcaaagctttctgctgaaatatatgtggtaaaacaaatgaccacgaatatgtccagtgttcatagttaaatgaagttttccatgtttctcgtcaccatgaataattgagaaccaactctattaagaaaagatatcctacctccaattctgattcctcataccaatgttacatttaattttctcacattggtttttttttctccagttagtcgtcagaatgtatttatttttaaataggcttatctaagttattagactctcaaggaaactttcaaaagcaggcaggcttggtttaaatgtagcttatttgagggtttagatatgatacaatatttttgttgcatattttgacatttttgaaggttatttggaaaaaaagtatatctttatattgtaggtagcattatttttagagctgtattgtaggtgtatggaatgaaagattgcaaacaaattatactatatggaattacacaatgaccagggcctgtgtttgtcttgattcataagcccaacttcatcttttcattccattataaatagaaacctggaaagatcagctaaataaaaattatgttttgtggtgacaaatttccatctggaattatgacatgcacccactcacacattaaaaatatatgtgcaagtcaagcgcgttggctcatgcctgttatcccagcactttgggaggccgaggtgggtggatcacctgaggtcaggggttcaagactagcctggccaacatggtgaaactctgtctctacaaaaatacaaaaactagctgggcatgatggcgggtgcctgtaatcccagctacttggaatgctgaggcaggagaatcacttgaacccaggaggcagagattgcagtgagccaagatcatgccattgcactccagcctcggcagcagagctagactccatctaaaaaaaaaaaaaaaaaaaaagtgcatttttcacatcatcctagcagttttgtttttgctttgttttaataaggcttgaactattacatatgaataccagaagaaggtacaattgaatgaggtatattgcatgaacactgactctgaagctctaatcgaagtttagctttatttcaaactactctcttattagatacttattaataccaatcaaatttctgttgctagtttcatcacctgagaaggctggaacacacatactgaaaaaaaaatgtggttattcctccttattaggacctcaaagacagctacagtgaatgtgctttgattatattagatggagattttatgtgtgcatttatttagagacttaaactgggaactcatttctttttatctaaaaatatcttttaaaagaatgtagtttctgatgttcgttgatctttattttgcatcatataaagagtctgctcagttttattttgaacaggacacttggttataattttcaaaagcagatttttggtttccaataccaagttattacactttatgggtgttttggtcatttcttattatgatgcattcctttagccttaatgagcataactaatgcactagagttaaaaatggaaatctcatattttaagatcatattggaaattattctacctaaatctttttacaaagttttccatgaattatattaatgacacaactaaacaagttattgtatataaaggatttagtttttttgtgagatctaaatggtagctgttgtgattgctgttgttgcttttttctagcagtttcctaacccctattgcattcttcagcaaactatttctaggacaaagtactaggaatctgacataaagtacactgttcctgaaattgttatgatagatgctttggactcccacctccttgattgtgattccattatggtccaccttcagggcatcttttcttaatgcacattaactcccagggtgatgaaccagactccctgggtttgcatgttgaattgcataacttctctgtgccaccgttttctcatctgtaaaatgggaatggtgagagtaccttcctcatagggttgttatatttaaatgagttacaaactttaagtgcttagagtagggcttaactagttagctgttactagtacattcctaaggtgctaaatacggtgttctggttctactggatctttgaaatcgtataattctgaggtcagaaccaacttgtcaggactttaggatgaaataaatataaatgtatgtgaaagcgatttgaaaagttagtatgtaatacatatctagaacagtgtttcacacatagcaggtattcagtaaatatgtattggatgaattaatttaaaaattaaaaatattatatataatggtgatatcattagtaaaatttatgactacaggatggaagtcaaaaccactcaacctccttgagtttgagacagaatattcaactcatctacattgatgaggtgcaaaaaacaaagatggtgatgatgaggatattaataacaactaacacatacctggtgcttcttgtatgttaaacactatttttaaccctttatattgatataaattaattcatttaatctttacagcagccctataagggttatccccattgaatagatgaagaaactgagtctctaagaggtcataaataaccagatttcagatgagatagagtgcgttcagggtggtatggccatagacaagatttcaaaccaaggaagtttggccccaaatgccatacctttagccctatgttataactaaggtgtaatttcataaaagttatttgttccaaccatttcttcacacacttaatattcatcagaacttccataaagtaccaaatgggctgatcattgtgtaatcttccctctttcttcttttccacgcaagtcttaagtgctgatactcaaactgagctgcacgttggaactacctggtgtgagcttttagcacagttgctgtttcagcctcagagattctgacctaattgatgtgccccggttatcaggttttttaaaagcttctctggtgattcttacatgtagcaaagtgttagaagcactgatctaaaggaaaatgaaattggcctaggccctagagtatgcctgaggggaaggggcatgatggtagtaggatctggaccctggagaatccaggagttgaaactcaagccagtttgctttgcttcttattgataattatgaaggcaggcagggaatactgggtggaaatactggataacatttggtgtggaatttaccaaaggattaaactgtatacaacattcttttaacttgttatttaatacaaatcaagtaagctttagtattgctttaaggattgggtcttagatggtcattacaaatcttcaggaaagtgttgtttagaaaaacaaaatggctacacgttgaaataggatagtaccttcctttagagatgccaacttaattgctccaatgagaagagtagtctccctttactaaactgtttaggaaaattgatatttatttctaatgtttatggtttgttgtctcagaagattaatgccaaatcctcaaaaatgtagtgacaagcgatgactcattttagctcatgtcaaaacaatgcacttttgtaattttcctgtccctggagaagctattaaacactgaacaaaatgcctcagaatgaaactgattgagtgtttcaaattatgtacttttgcttggctattagccagatgttcgtcgggaaagctcactgtacatcaaggcctatgatttgtgctgacaataatattacatagtttacactgcttaaatatcagcgatgtgtattctaaagctaaatagtcaaagttcagtctctttgcataatcaagttgtgtaactctactctcagccaagtgatttttcctttattaactctggacgggatgtaagtaatgggtaaggtatttttctctgcattatcttgttgataaatagcacagattccagctaggttaggaagagtctcaacacacacacatacacacacatttttaagatttatacatttgatttttttgtgagtggtaccacctgccttgtccctagtagagctcagcataatgttttttgtgtagtaggtacacaaaatatgtgttgctgataatgatgccaataaacaaaacaaaacacagagtgtttttttcattaatttcctataatctgccagtaatatatgaggtcttacaagaatcagtgttaagccaactatgttttattttttagagacaaaatatttaaatgattggcttgctttcactgacctcctaagtaatagaaatattcatgatgttatattagacatttgtggaggacaataaaattagtgtaactgactcttagtattcgagacattcttagtaccatgtgacatttttttgagtaggaatttgggggcatggtctcttgacaaccaaaagtatgaggttactcataacagtttctattacacccagcacctgggaaagagtcagtgctgaatagatatctgttgaattgaactgaattgaacagatattcaactcattctcatttgctcatgttttacaagaagcagtttctcagatgcatttccatgggaggacatgaaaaaaggtagtgaaaatgaaataccttctgattctatggcatggtaataggaagttatcttgatatataagggtatctagctgtcagctcattctgaggaaatggtgtgaagggtagtaattcaaactatatctgaaaactatagttttgatccagggaagaaaccttggattatagtccattgttaccagtagacactggacaaccaaaaagattaacaagtcaacaaaatgcttgtcaggaagagattcacactaaatcaatagtgtgatcttattttttattaaaaatcaggcatatccatgttatgctttctactattctagttgcctgtcatggaaaaggtttaacagaatttggaggttacacagacagaatggtaatggggtaacttccatgtgaagatagtctgaaatttagatgataaattgatagattaaagaggaaaaaaatctatgaaagtgatttatttaaagcaactaaaatctataaaatcataagcagtgtggcaggacaaatactcctgttcacctaaacctagaactgttagaatctgaggtttcatgattaaggatataaacaaatggtcaaacttctgggtttaattcctttcctgcccatttatacttttgtgtccctaggtaccttatttatcatctcaggcctcagtttcttcatctgcaaaatgctgcttataatagtaactctctcatagggttgttatgaggattaaagtttaagagagaagcacttaaaacagtagctggcacgtcataaatctgtgtgtattcatacatgtgtgtatatgtatacacatatgcatgtttttttttttgagacggaatctcgctctgtcacccaggctggagtgcagtggcgtgatctcagctcactgcaacctccgcctcccgggttcaagcaattctcctgcctcagcctcctgagtagctgggattacaggcgcctgccaccacacccagctaatttttgtatttttagtagagacggggtttcaccatgttggtcaggctggtctcgaacccctgacctcgtgatccacctgcctcggcctcccaaagtgctgggattacaggcgtgagccaccgcgcccggccatgtatgcatgttttaaagaattttccatatgggttaggtggaccaaaaaaaaagtaggtttagaagaattttgatagatttatggatgattccaaaaattggctgttaggagtaattcattttttaagcttgcatcttaacaggaccctacacaacatccttgtagctaccatgagaaactgggaccctgggctggttggatcagtgacgtggcccccaaaaaagtgtgtctttttttactaagatgcttcatatagaaaactacacaatgctcttttcttatttctgaggcagaaataagaaataatagagctgtcgtcccctgctgcttcatttaatggtactcatttgtcctaaataaaaaactcttcatttggtaatagaaaaatatggcttcaagtaatagaaacaagcccaagctaattgagttaagcaagatctctggccaggaagagtaactgttgagatatgcatcttgtttttctaagcaaacactcctatttcagaatctgattggaccttaaaatctgcttacctggtttaagctgcccaattttcagacaagcactttacatttctggcaatagtgagtgtgatgaatgtttttgttattattgctcttaatgataagtgtatggctttcattacaataaacaaaggtctataagggccataggccagattgtttcaccattagaatgtgcttattttattttcatcatttgctagtatttttgttcctaatcttggaagagatctttcagtagggagagaaaacattgctatccaatcaagtatttgtaaccattttcagtagtagaatctgcctggcaaaaatttatttggtttctatgaaggcagtgttttcagccctagcatttttgaattatcaaattaaaatagagctttttaaaaatatatttactatgcttctttagaataggatattccattaaaatgaggtcaaagagccttccaaacattaattcttgttattttgacatctttttatttcaaacatagtaagccttgaggtttccttacttttctcttttttttgtttttttgtttgtttgtttttacttttctttatggctgcttattgccttccagtcaattttagattcatgctaattttaccccattatcactgtagcaactacctccttcttgcctcccacacccacttctcttctgcgagacttcgttctatccatcctcttttgctctagaatcttcaatctcagttggcttttccccctaatttcactgtttctacaagtgaccagcctctctctttcctaccagtccttggcaaacctcttgaaggagtattattacactctttacgtctacatcctcaccaccttctttgggtccttgaagtcaggtttcagtgtctaccattctgaagaaattgttctctcagaggtcattggtggcatcctcagatccaaaagccttcactctgacttcatcctctgccactgctccatgccagttaacatagttgactgcctggtgactcccactggtctttccaagttctctttctgtttcatagactgcttcttgtctaccttcctagatagcttatccccctttgaatgtaggcatttgccaggacaggccaactctttgctttccacagtatttctcccctgggactatcatctactactgtttcaacttcccttctgtgctgaaactcccaaatttttaccttcaccactgctggcctgagttccatctagtcccatgtgtgcacttactcctagatatctcaccagttcctcaaccacaggattccaaagccaaactctcttgtcctctaccagtcttctaattgctcttactaggactaatcttcttgtcatcagggcccacagcaattgctggtctagtctttgtatgtcttgcatctttagaacatgtaacatactccattttacatcttatagcataatcattatttctccatttttctcgtttattgaggtataatttatttttactaaatgtgcacaaatattaagcatacagattgatacacttttacatatgtgtgtactatatagtctctatccagattaagttatagaatatttccaactctgccactagcctcctttgtggcacattccagttgatatccactttcttactgagaggttgccaccatttgatgtctattactgtagattaattctgtctgttttggactgcatgcatgtggactctcatattaatggaaatgcaacttcatataaatggaatttacattgccatcagaaatgtatgcaaactctagttgcttcacttctttaacatttggtaatatctttttatttagcctttctggccaggcgcagtggctcatgcttgtagtcccagcagtttgggaggctgaggcaggcagatcacttgaacttagaagttcaaggccagcctagaaaacatggagaaaccctgtctctacaaaaaatacaaacattagctgggcatggtggtgcatgcctgtggtcccagctacctgcgggggctgaggtgggaggatcgcttgagcccaggaggcagaggttgcagtgagcggagatcgcaccactgtactccatccaccctgggtgacagggccaagaccttgtctctaaataagtaaataaatattagcctttctggtagggctgtagtactccctcgttgtaaatttaatttgtatttccctgatgatttataatgttgaaactccctttcacatgcttatttgcatattctctttaaggccccttcaagtctgtttcttttatattgggttgtcagtcttattttttattaaattattggtttataggagttgttcatatattctgtatgtgagtcttttgttggttatacataagcaaatatcttctcccaatctgtaacttgccttttcatcctgttgttgtattttgattaacataacttatttatttcaataaagtcttacttttttaaccttttatgattggtgactttatgttcttttcaagaaatttttaacttcttcaaggtcatgaagataaaactgaaacacagaaaggttaagtggtttgcactaagattgtggcagactgagttttcctcaaaactttaattgtccccctcttcctgggtatatggctgcccaaccagacatttctagcttttccagtactgagaagtggctatgtgagtttggattggatcattgaactataagtagaagagatggtcatccctaacttgaaagcaagacacttttcatgtattttgccattttccccacccatgccctaactccctaccatgccctataacagagatatggtagagtttcagtattgatcatgtggatgaagacaactctgaatggtttcatggagcagaacgacttttaagtttatttaaataatatttaagtttatttaaataatgtttagataatttaaaacttgtttgaataattagagtatatttaaacctaaataaacatatttttgggactcttactgttatttagacttcaacaaatacacagagttggttagcatatactggaagcagcccttcaactcagatcttcagcttcttgtactcttaatactttgtcacgttatcatagtgctgatggaatggtgtggaatagttatcttaactacctattacccttttaattttcttttttattttttttgagacagagtctcactctgttgcccaggctggagtgcagtggcgcaatctcagctcactgcaagctccacctcccgggttcatgccattctcctgcctcagcctccccaacagctgggactacaggcgcccaccaccacgcccaactaattttttgtatttttagtagagacagggtttcaccatgttagccaggatggtcttgatctcctgacctcatgatccacccgcctcggcctcccaaagtgctgggattacagacgtgagccaacgcacctggcgtacccctttattttgacatctgcagctctttgctgaacataacattgcacccatagcttccactgttttttcacattatgtgtacttaagccaaaccatattccttgctttttcctgaatttgattgctctttttgccctaatccccttcccttatgctattaagtccacctataatgatttttgtgttcccttctctttttctccttgtctgaactatgtctgtcttttaatgtgcaacgctaatgctatctggatccattaggagatcaagccattcctgatcccctaatcagtgatcacctctttttccaccacctgaatgcttttctcctcctgagggcaagggccatatgtgtgatccagtgcctggcacatggaaggaactcagtaagcattttgaaatgaatgaataaatgaactagatgataagtaaatttttcaggtactgaaactgtgtattgaatatttgtaaatattgatctggtcatgcaatgagcatggccaaggatttttaaactgtccaattgtttttgtgtcttctctgtcagtgaagttctaactcggcagttctgaatcagcagaatttctgtgctgtatcactttcatcttccataacatagcccatgcagctggatatgtcagtacaaattgctgacatagtatgtccattacctaatttgaccttttagcaaataagacctttctattataaagtgagaagaggtatatgtggaaaaagagatgctattttctattgaaggcagatgatttgacttagacaactatgtgacaactggcttcactcgtgttctcttggcatcttaaaagaacatttgaaccatatttgaaataccattatgttcctatctgcaagttccactgttggagattctcattcagtatgtttggggttgggcccaggaatctatacttttaagtgtctccccaggcaataatgatgatcacttaggtttgggaaccactggcaaagaagtgttaagagctcagatatgagagtccttgaggcctaattctcctctccagttactagcagtgtgatcttgggaaagttactgtctttgagcttcttcagggtgattatctgaatattatgtggacaataatattacctcctttaaaaggttgttaggaggattaaatgagataatctactgtgcttagcacagtgtttgacagtaaatatttaattaaatgtaattgttattatcactaattatcaagttatttacaagagacctttctttgtattttttgtatagaatatacaaaatagaatctaccatctacaaaaaaaaattcctattgtgtgtgtgtgtgtgttctttcttttaatgggaatcttaattagcttcagggatttagttaaaattctgtgtgagattactctgaccccatttactctttgtgaataatttaccagttaacaactctatacttaaaaaaattattggagaacctttgtgtgtgcatgtgtgtgtgcacaggccatcaaaggaatgcttacctggaaaatgtaagaaccaaatgttctagtgcagcatttcttgaacaagtagatggctaaagtgtcataatttaggagcttcaagttgaggctatgggtgaaagacatgcagggagacacctgtttcaagttctggcctcttctcataaaattaattttctgtctgatccaataccaaacagaaaatggagcagaggtactctgagctagggtttggtggtgctacctgcaaaataaattgaattttgattgtgtgtatacactgtaccatgtgcttgtgtatgtttcatatatatccatgtaggaatgatgtggaagccttgggtcaggtgagggggtctggggtgtgggtggagtcatggtatcaaaaggagttagagccaccccttgtacaatagttacttgttaacaaatttgtgaataatgaaaagtcaaattttcctgcagacataatcattcatggcaagggcaagatttcttttaggtgaagcagaaactctctagagtaagagaatgagtagatttacttgaaaaatctttgcataaagaaataataatactgctaataatagggtatcaagtgtgtcatgtttttcatcatacagatgaaaaaagtccatcacactgctaattttatttaactcataataacttaaagttgctatcagttatagttaatttagataacctcagtgtatattttgccacatttttattccatttccattcaactgcctattgaattctgaaattgcatggagagtaggtgatgaaagtcacagtctgcaacccctttcctgttctttcacttgagtgaacccttcatattcagagttcatttatcattgtcaacaagagctgttgtcatctgaccaaaatgagtgagaaatttcagttctcggggcaaaatgtgtattcagagctgaaattttgtttaagaataaggctgattacttaacagtgaagggcttcagtgtggggtcagctcaccctcattgcactttcaagtataatattaggtattcttagatgtccagaacctgtgaaattcttaatagagttggtttatacgtaatttctattctttgacttacaagaacttaaatcttgtctaaaaacctgtatggatttcaaaggcttagagaggattaaaaggctataaaaatttaaataacttcatccagtgagtatgtttacctaaatgtgtcatcaaacttctcagctttctggttagaaaactggtttgggacacactgactcacactgtcgactgatagaatgcaaacacattcagaattctcctggcaagactaatgtaacaaaaacagggttctgtgagcttttagaggtgaaatgtttcatttctttaataaatcttcctatcactgagagcttttaaagtaaacaaacacatgtcttcacagttgttaggtgctaggtgaagtggcagatgcatgttgttatatccagtaccccttaccactttccaaggaaacaatttttgtaggtaacctggggagtattatgttttagcccttaggctgaaaaaaagtaatacgctataattctaactattatctccatatgtaaataaacattttatggggtttatattttccctttggcctatagatctcaaattctttgcccaaatagttacccatactcttctcagaaccctcatgcaagaaagtagataactagaatatttatgcccattttatagatggaagcatcaacacataactagtgttattttttttaatgttgcccaagaaacttgggcccaaactcaaacaatggccaaaggcagttatattctctaagtaaggttagctgagcaacccttttcaaggatgaagagatggagactggcctgtcttcttggcagagctcaggttacagttgaaataaatagacgctcctgtttctttctcttttccagttggttatatctcattgccgtttgttcattcacatgttgctgtaattagccaattttaggctaggcaaagggattaggtagcgcattacacacccacatctccctttctgggatttaggatgaaatgagatttatttttccatttgcttcagccaaatggaaatgtatttcttcaatcctatttggctgtaaagtaagtttttatcaggaagttgtacaataatggataatgtgaaatccatttctcttgggtgttttgctcgtaatagttttctggttgttgtttttgttattatatattatataatatatattatatgttattataacaaaataataagtattattattgttaagttgtttccaaatttgactctagacacacttaacacaaggcctgtatacactctaggttctctaacaacttgccagtggtgggttgagatttttctgcatgacgaatgtctcatggtctcaggataaaggggaaatccaaggttgtggcatacagggtctgtatgccctggctctaaaatactcatcctcacccgaggcttaactccataaatttatctttttaatgtacctgtgagtgcatttctctgcctgctaagtctactcagccttgaagctaattgctgcctgctgggaaaccttcacattcgctccctgcagagctaatccatctttctaatcagatccttgagcactcttgtacatgcctctgttacagctcacaattaattaactcattctacttatgtttccacctgggcctcaaagacaggatccatgtcttcttcattatttttttttcctagttcctagttccaagcatagtgttaagttaaatgaaagaatggataacaaatatcccccattttctctcttttcacatataaccaaaatgttcgttctctctttttttttccagcaaataatcatttgctttcagttccaagtctttattctttgcttcctaataacattaaaagttttaatttttagagtgttaagaacacagtgaaactttatctcatgagaaatctacattatcatcaatagttttatatctatcttgttggtcatttaaatcaatcaagttatacatccatactgacctttttggttttattcagccataaaaaggaatgaagtatactgatacatgttacaacatgtctgaaccctgaaaacattattttaagtgaaagaaaacagggacaaatagctacatcttgtatgattccatttatgtgaaatgcccagaataggcaaaaccatagagacagaaaggagatcagtggtttctagcggctgtagtgtcactgcttaatgggcacagggctgctgcttcttttttctgtttttcttttgagacagggtcttgctttgtttcccaggctggagtataatggcgtgatctcggcttactgcagccttgacctccctggactcaggtgatcctcctacctcagccgcccaggtagctgggactgcaggtgcatgccagcacacccagctaaattttgtattttttgtagagatgaagttttgccatgttgcccaggctggtctcaaactcctgggctcaagcagtccacctgcctcagcctcccaaagtgctggcattacaggcatgagccaccgcacctggcccacagagcttcttttcaattgacaagtagtattccattacatggatataccacagttttgtttatccatgcctcagttgatggacatttgggttgttttcacttcttgactatcatgaataatgctgctgtgaatatttgtgtacagatttttgtggacatgtgttttcatcttcttaggtgtgtacctaagagtagaattgctgagttgtatggtaactgcaatggactgaatatttgtgtccccccaaactcttatgttgaaatcataactcccaatgtgatggtattaggaagtggagcctttgggagataattaggttttgaggttagaggggcattcatgaatggaattagtgaccctcataagaactttctcacccactttccaccacgtgaggaaacaaggagacgacagcggtttacaacccagaagagggcccttaccagaatacttctagcaccctcatctctgacttccaccttccagaactgtgagaaataaatttctgttgtttacaagccacccaatctctggtattttgtcatcacagccccagcggactaaggcaataattctacacttaactttttgaggaactgacagactattttccaatgcaccattttacattactacacagcagcatatgagggttccagtttcacatccttgtcaatacttgttattatctttttgattaaagttatcgtagtggatatgaagtggtatctctctgttaccagtgattaacctatttctaaaggaaagtagaaagtaagaggcatttgaagttactgagaatcaattaaccaaagaatgtttaataggaaataaaaaggatacaatctaaagctcataaggtggcctggctaaatgaattgcatctataaaattgaataatatgcaaccacttaaaaaaagaatagaaaaagtattgtatgatcttcatgaattgctgatatatgcttgtaataatctttttaaagataaatacaagaaactattcatggtggattatctttgaggagtaggaagtgagagcagggctatgtgcgtgaccctgaagcatatatgcaagatatagtgtgaaaaagctgtgagttggaaattacttatttttaagaaaagaaaaaacgtagaaaacacatattcagtctcatgaatcttgctaatgcgtttcttctgaaacatcttctgaagctacaagtttgtcaggcatctcggatatttcagagtgttactgagaaattcatggaaataaatggagtgtatgtgtatgataagtagggaggaaatttaaagaagtgaggattggcaagtagaaattgagttaaataggaaactgataaagaattctcaaacactccaaactaactgaatttaaattagagagggaatttggcaaagtgggccttagatcccactattttcaacaaatcagacttttcaggaccatgtagggccagtactgagtgttgtgagctgttgccaaatatgtcatgtggtgagaaaggtaagccaggatcctggatttggactctaagacttgatataggatatatgaaggaggaagcctcagacatttcagagaatgagcaatggaagtttttttatttttggaagaccagtgatgctaggccatgagaacctgaatttgatagggaaaaggaaatatactgaaattatattgacaaggtgaaaatactctttcaataaaatgttataatctttaagtgtgtttttgatatgttagatttttttttccagaagtaacacatctctaaacaaagcccaagtcagtgggaaagtctgattcatgtcattaacattcactttatactctttacaacatcatatcatgtttaaattgaggtcagattcaagactagtctcaggtaaagttataaagtaagaaattggttctcttcttcattgttagtaatggtataaatatcttttacagaaggcagtttagctataggttttataacttaaataggttcataacttttgacttagcaatttcacatataagaattctaaaacaataatcagaaaggcataaaaattcattggaatgtgaggccattcaggatagagttctttatactagtgacaaaggaggaatataaatgcccacaacagagaatttgctaaataagttgtgatgcacctgtgtgatacagtagtattcatctactttcattgtgatgtagagtagttggtgatttgggaaaatggtcatgatgtttttgttagtgaaaaaatattggatataaaaactgcaatgtatgaattgagtgagttgtttttagtgattagttaatgtctctgatgtgtttaatcttaaaatccccttttaggatcattttttttcttctagctccatgataagggcaccatatgctcttaattctgccttcttggggatagtcccaatgctcttaagctcattctgctttcctcatcaaaatgggcttgtcttatatcccattctcccatgaccatgctaaccgaagggaatgaatccagaagctaattcatgatgagagattaatggaaaataatagattaaaatgtagccaacttttcctacatttcattcactcattcaaaaaaaatatttattttacctctcccatactcttggtcctgtggaaggggctgtgtaacaaaatatatcaaaagtaagcccgcttaccttagagtgggaatatttgatttttcataataactttagacaagaagatgcaattagtgtgaggatttttgacagtggcaagccagagaagcattggagactttggatgtacttaaaaaccctcactttggttcagtcttgatttcgcatatttggaaggctacatttttcataataccaccaaactaacatttctgtttctctaagtagagtgatttaccaaaaagaagaaatgagtcttaatggtttaaaaaaaaaaaagttcacagagcactgtcttgcccagctcagtgttatacagtgttagatcattaggacattcagcaattctcctacactaaaggaaataggatacaaccatgccttgagtataagcccttattttgcctcctctgtatcctttgttgtcattagcctgcaactttgcattgcacttattgatgttatgtctgtctcccctatactaaacaatatgccacttgaaaactcttattaattgtcacattattagaacccagtatagggtctacataaatgctttcttggcaactcaaaaatatacctattggtatcatgcagagtacataagtaaactgctttgaagaaaggcaaatttgaagaaagatacgtgtaatggttaattttatgtgtcaacttgactgggccatgggatgtctgaatagctggttaaacattattttgaggtgtatctgtgagagtgtttccaaagaggttagcattttagttggtagactgccttccccagtgtgagtagacatcctgcaatctgttgagagccagaatggaacagaaagctgaaggcaggttgaattaactgcctgggttaattgcactggcacatcaatcttctgtccttgccactcctgattcttagggctttagattgggaatagaatctacaccattgattttctagctttcaggtctttcggctacatgactggctttcttgggtctccagtttgaagacagcagctcatgcaactgcccagccttcaggatcatgtgagccaacactttataataacggtttatacacacacacacacacacacacacacacacacacacacacacacacacgttctgtttctctggaggaccctgacaaatacagtgctaatggtcactgagtgctttttatgtgctagacaccttacttagcacttgctgtgcattatataattagtaatcacaggaacctatgagatctctatcattttttaaacagatggtgaatcggagacttaacaagattaaatgctttgcccaaggtcaaatagccagtaggatcagatgagaggatgggaccatgcttcatggtccatgctccacgtttgttgttctaactcgagtctatgcttttaactctgataccctgtgctcttccataaggcctttctgtgcagtgatactcactcatcacttgtgccagccatcatcttcacggctggccaaagctgtttggcttcatcttctcatctgaagaattaatacacttgccaggaaagtttacctatgagttgcaaattcaggatacagtttaattctaatatcccaccttgattttcacttatgaggcaaaaatttctattttgatatggtttagtggctcttattcctctttatattttttagtccaaatggaacagaagtttgaggttgcctttccacattcagtttttggctacctgttttatagggctgttaaactagtaaccaccagctagttagtagatgtattatagagtatttactgtatgtcctgcattctcctagggctgtgctggctgttggataattactgtgtttaatctcctttttgcctgatcttccacagtgttgcaacagtggtgtctgtgccacagaatgaacacctgcattcttcctaaattatctacagattattttgagtgccttgtcttttcacctgtattttagttgtgtgtaaaatttatcttggacctcccgtaacaccaggcacatagtttgagtacctaggaatgattctagggatattctctagaatatcatcaaatatattgtcaggagagctggcttctactctgactctgcaactatttagctggaagatttggtgacttttttttatcttgggcttgagaggcctcacttttctcaattcaaaaaatcaaagcattggtctagattgctaggtcttttctagcttaaattcttggcttctgagatttctgtaattttttatagttatctggtagattgattcatggtggttgtattaacaggaataaaaaagttgtgagtggacttggatgtgcaaaggtgatattaggttaagtttcaaatatgtggaagcagtagggtataccgaaatctagatgtcctttaagaatggatgtacagatttggatttaaagttggtggtagtcactgtcattctcactgacctcttttggtagtggagttagaatcctaggcttgaggtaaaaggtacttgttcatgacaatcacataatcacaaatttttaggtgtgaaagagacacagaaatcataatcatatgccctgcccttgtttgtttgttttttgttttgttttgttttgttttttttgagacagattcttgctctgttgcccaggctggagtgcagtggcgtgatctcggctcactgcaacctccacctcttgggttcaagtgatccttctgcctcagcctcctgagtagctgggattacaggcgcgcggcaccacgcccggctaatttttgtatttttagtagagacagggtttcaccattttggccaggctggtctcgaacccttgacctcattatctccctgccttggcttcccaaagtgctaggattacaggtgtgagccaccacgcccagccccttgttttatataccagaaaactaaagatttgaggaatggaatttgccaaaagttatacatagctgcagatcaggtctgcagaccagactgccactatctctaagctcctggttcatccctcactaggcttgttaatgttttctttttagcattcatagtattcttttgtaagcaataaactcactatcatgtatgttcaaatacacattcaaaattatttgtaaaatttagttcagaaaactaaatttctgggaaggaaaagcaatcaggtagcattgtcactctatctgaattttgacctctgaaattaaaaggcattgtatggaaaccgctgaattgtgcagttttaagagtatggttttatgacatctgttgaaagttaagtcatgatggacggtcctaaatggttttttagtacccacatgaggtaattaatctctctgcatcccttttcagatcctgtgttaggtccagcatgtatgaacacaaggctgatcatgtcataattctgtatagaattacaataacaaaatatttgtttgcagtggatctccattttgttctgtcaaagaactagatgcccatgacaaaggtcaaatggagatctggcatccatttcaatacttgtaagacatagtcttgagaatatgtaatacaaatagctccttgccagaaaaactgaaaggaaatgattgcatttgagtacaatgtattctacaacaatagtttagtgtgtatgaaatttaaaactgctggctttcaaaatattttttttaagtagactttatttttttaaagctttatacccactgtgtattgctttgtaggatacccttaaaagctgagatttaagaccaaagaaactgaaaatcttaatggcacgatattgaattctctagtaaaatactttagtttaatgtgtttattgatttctcctgaatgttctgtcttcatgagcattaatgttattacattagtttaccatagtggtgcctttttttctacccgtcatgaactcataatgccttagaagaatcagtatcaggtcttaaagcctgcagtggtgtctttgttttacacaatgaacaaatattcaggattgtataggtgaggaccacatctaccttgttcgcccagtatctagtatgggacctggcttgcagtagacatatatatttaatcaattattgtttttgttttgttttgtttcagttaatgaatggcaagtagcactagctccaaactaatgagtttaacctaaaaattagataaattaactcattcatgtatgtatttcaaggaggtttccaaatcctctagaaagaaaatttgatgtttttgagagaagcctttaaaagtggtctgatttactcagttaacagtagggtcaaatatggctcaagcagtgttttagtcaccttgtctgatgcagtctggaaaaataggcctgtcataatagaaaaggattgatggtgaaaatacttgtttataaagttgtttcagccaaagggagaggtggaagtgctttgttcttcattgaaacttaacagcaaagaacttcccagggtgtggtcaaggcaacaacacttgaagctggacacctggtgactttcctccaaagggccctaaggcctctgcaccactgttctatctagtcaaacttggacagaaaaggaacaagagattaattctaccttgactcctttctttgtggtgtttgagaagctaccatttgaacttctgatttacaaaactgaactatcagtgctaacctactaggccaagattttatgaaaagtaatttaaggctttaacacaatccatggttgaagccacagttttatacagagctgccataacaatatttctttcctgctttagttgttgtttcaagaccagaaatgcagtaacatatatggatagcatacatagtttgttttagaattctaagaaagaatgcatggtttcaaaaaaaagcaactcttttttttcttcagagccttttgccccattgaaactgaaaaagaaaaaaaaatatgcaagcttttttgaaagtacagacaaaattggcatttcacttatgggaaaattttgcaaaattacattgactaaaagtactgtgaagccacacagaaaggccaaaaattattggcattgcttttgtgtaaaaaaccttttacatagactccacctgtaattcagccaagtacataattcaggtcattggtgacacacgtatccacatgttggagctggtcagtgaacgttgtcatgaaacatggatagaatattaccatatggacagaccaaaccgcacagattacagctaaggaaactttgcattaacatgcctgggaacaggctttcctgagctgatccctgcccccacccaccctcagtgggaaagccaattgcttactgattacgacagcgacatcacttggcaaacattttggcctgagctcaatgtgtgacatcagtctcctttagggttttccacataaaacaaattctccaaagaaaacacagaaattgagccttaatttgaaatccattattacatcctctgaggtctcattaactacctcaatcacgtagttcttaatttttgttttatttccaggtagatacaaaccaacacttagaatgtgagcagtaaacctttaccgtgtttatttcagagtttcaaccagatacccctttgtatctattttcaaccaacctcccttttactggggttatgatatctttgtttcactgctgggagggttgctagtttgggagtggtttacaacactttgtttgaggaaggaagtaaacattgttctttgacccttcaggataagttagtctcacttttgtgggaggcagctgtgtccttgagagaaagcactcagtgaagttggaaggactcagtcatggtgtgttttgccatgtcacttgaaagcaaggcacactacgggtatttcacactcttgtgtgtaagcacctcctctgagcgtttatttacctgaagtcattagtttcccccacttcctgtttcgttagatggtattcatttaatactactttgatgcacatggccttaaagcagatagaagtcagttatgcctcatgaggcctgcagtctcccagcagaaggcaggaaagcatgaagggtggacgtgaatgggcccacactaccaagatactggaattgtgatgttcaggcaaagcaagggaagtcacatatgcatcaagggagttgagaataggtttaatattgtcacattcaaagaattccatctggaaggtgttccttggcatatagaaatagatgaatattctcatatcttctggaatggctaaacagagtgatagacactttttcctacttcttgttaatggcatgttcactttaattattcttcaaggtaaagaatcctataaaggaaactttatatcctataaagctaaaagtaatctcttaagttctttctcttaaattcattttatatatttcaaaatactattcttcatatattgatttagtagtatacactttacatttttcccacaatttttcttttcctccagcccatggcctttatccccactgatcttttgttcccatttctcagtgttgttccttcttgctctcttggtttaaataatctttgccatctgcctcccaacattccagtataacttcaggatagccctctccagccttcctccagaagatagtagagatacacagtgaatatcagaactctcctccaatagcccttcacattcccaccataaatctgtatcatcttgccttttcattaatgtggtaagccccctgggcagggacagtctgtacctctttgtattatgccaggcaacactctgaccgtgatcagtaaatgttcataataatgaaagatgaaagaaagtgtctgtgttcagcaagttagtgccaaataagtatggaggccaaatgaggccactagtgccaaaccacaggggttcaaaataatgtttaatataacattgtctcattgaataacaaatcttatattgtaatgtctgagtcaaatgtttctttggtgccagatttcttgtgctcctttaatctgtccctgtagatatttcagagttcatgaggagcaagttagtaggacctttcccctgccccctctctgccgtgtagtgaaaaataaacctcctggaaaaaatagagtgaatataagtgccatggattctctggcactccgaaaaaatgcctaccataaagtatatggaaaataaatgaaagtttgctattagcctagatattgaggtaactaacttaagttacctagctgaagtatgaattggaagtagttgaataagccatttgagattggttactttccatcttttcagtatcaatagagagggttaattgtcctttcagtttcatatggatgcttatactgtctacagtggttcagaatagagggtcaaagtagaacaaaataatctaccctacatatggttagaaaatatttaccaaccaaactctccttttttgcagccacgcttctcaaaatgctagttcacattttaagcttctacattcttatttcttattttgttttttaaagcattgcaatttggcttctgcccttaccactttattgaaatggctcattaagttcctcagtattttcttcattgccaaatcctgggacatttcattcttttctgcattatttggtgctatttgactgttcactctctttttaaagtctttgctcacttcatttcattgccttctttgtcttctggttcttctaagcttccaccatttttttttttagcttccattttcaaccccctttttcttccagaaaactgccaagccttgatgtattctagggttccctttcaacattctctcttctcaccacaccaacacccacagtttcagctatcacctgctgcaggtccatatcaccagcccatccttctacagacctatatttctgaccatgggttgactttatacatattattctttacaccagatactgtaatataccaaggtacctcatactcaacatgtctaaaccaggactcatctcctacctactcaccaagtagaaaccatcctgcctgatcaaaatcctacaacacagaaaactgtgccccattcccatatttcatatgttcctgaatagccaggagtgcttctcagtaactccttgttttccttgctcttctttccagtctaaccagtcactaattcatattgactaaacatcataagtagttcatgcgcacacccccctcccaacctcatggctgttggaacacatcccctcatctttctcatctggatatttgcctcctatgtgagtttcctgcgcccagtctaaagctcctccagttgttcctccatgttcccttaatcgttctttaggaaagcataactgatcatcttattttccctttcacaattttccatttgctccttcaggccaacagtataaagtccagctgctcaaggcaagcctttccttttctcatcctacaatcatgccctatgctgtagccatgtgaaaagcttgagttccctcaaaatgcaggttcttttctcacttctatactaacacacttatttcaccccttgccatgaatatggttttcattcttgtttgcctagggactagacccctgttgcctggtctttgcagccttcacagggcactcccttcaagagttaggggcctaacatttatggttccacagtccttatcacacatctggttatccatacattgtactgataatgtcttcaaacatatccttttcctcaccctggactatgagatctttgagaacagagactgtgtcatatttatctttgtatccctgagacctggtacagtggccagctcatagattgcagaatgggacattgtttgcccaaagcagccttacctttcacattcctgttctagtaggcatatgaattcatcactcttctccatgtattctttatgttttctcttttcttcctccaactccaatatggtttgcctacgggatttttctgccactaaaagctgtcccaggattcgtctgtaagattctttatgtttttccacaactttgtccaactacgaaagaaaacatttatagcctgttaccaaattgtttatatactgttgtctttcactcttttagaaatgtccctgttttgattaattcggcagtgggtttttttggttttttgtttgtttgttttgaaacagttttcgctgtcgttgcccaggctggagtgcaatggcgcgatctcgactcactgcaacttccgcctcccgggtttaagcgatccttctgcctcagcctcccaagtagctgggattacaggcatgcgccaccatgcccaactaattttttttgtacttttagtagagacagggtttctccacgttggtcaggctggtcttgaactcctgacctcaagtggtctgcctgcttcggcctcccaaagtgctgggattacaggcatgagccacggcgcccggccagcagtgggttttttatctccttgtttagtgtttattctcttgttaattgatacttttgggtgcatttcaatacaaatgtagtctctttattgccatcaaatttttcttgacagaataatctgtgtccctgtgggtatcaactgtttccacataacctctttctgacactcttatgtctctctcctgagaagctacattaaagaaatgacaggaagtaagagaatccttgcacggtgctggattcgcagctgccctagctgatctcttctgccccagcccaccctatagttctctgtaccagtatatgcctcttggatcgctctaccaggacatgctatgattttcattttattatacatcaaggtatttccattaaaatagatctatgaatagataatctattatgtgttggtgtatagtgtgaatgtcaccaaatgtaagtactaagtccattcagattttcacagcactatacttacatcttttttacaaaatgatcaacctgtggctgatacatgtgtttgtctcccctgctagactgtgaactccctgaaagctgggcctacatccttctttttttattttatttttaatccttggcatctaacagagtgccttgcttataagaggtgcccagtttacagactggaaacaaaacaagcaagcaaggaaactgagattttttttgttttgttttgtttggtcacacatctgcctttattgtgagcagcatgtgggacacttccagcagtagtttaaaaaaaatttttgattaacaaaagtagggattcagagaagctgtccagctggtacccttaggggcttatacgtggatgctaagccacagcagcaggacaggactccatagcctaggaagagtgagagcaccaaggacatgaggagctcttggcagatatcccaagtgcacttggtggaagtggaggtgacctcataaaggaagaaccaggcagtaaagaacatgccagtggccaaaagcatcacagtcagatggagttagacagccaagctcactgggctggtttatcagctcctggccttgagctccattttgcccagcacggggtaagctgccaccagaaaaacatgttggcaagagctaactcgggatcttttgctagtgataaattaatatctattaagaacttggttttgaaaacacccgactttctagattagatacagatgcagtaagtgataatgttgattgatttttacagtttgcctttgtcataaaagatttagaatgtgtgactcattgtgaatttaaagccaatttaagttgtgtatcctaaaaagcatgtacttgactagaaatgtacttgactagaaatctgggcacaaaatgaccaagtcatttcagaaaaagagtacaactgaggtgtcccagcatatagaacccagtaaattctctctgacttctaaatgcttaaattcacaaaatacttcattatgccatacaattgttgatgatttttaatgtagccagtccttttgtgaaagctgaaactgctatgttgtattgcctgctggcagaggcatcttctgaggaggctctagtgttgattgtcatggaagtgtgtttcaaaccactgcagccctctgaaaattttatcttcagttgcccaaacattagagtccattgtaaggaaaattcaaatcaactccttttgcaatttgagagtgaaatagtgataggatcagctttactttagggaagttattagttgacttagaaaatacattcaatttaatttgtcacaagattgacattagaattaatgtatgaataattatagtaggtattcagtaaagcataaatgaattactaaaagaggcttttctaaatccaaaaacagtatttccttggagagcttgttgtaattgtcaagatatgtatattaaattttatacaaaccaaagagagaaaatagaaggtttatttaatccactcttgctttccattgtttttttccctttatatgttcgtggttgtttgaagggaatggaaagaaggctagaaggaatccgtgcccttcatttattccatgaccccctaagtggtctcccttcctctagccttacctccttgcagtctgtcctcatcactgacagcatgatttttcaccactgggactccactctcctgttcggggccaaaaggcccttcaccatctgaacctcctgccaccttggccccatcttcactccatatcttcccaccgatcctacccaactttcagccacactggacttcaggcagttcttacaattcaccatggtgcttcaagactgcttttttcaatgccaagacctggaaatcttttttcctctttcaccaaaactttccctatacatgagcttttcaatacatattaactaactaaatgaataaaattaaatttaaaagcttaattataccattgcttaaggtaagtattttaagatttgccctaggttatgctaataatactgagactcttttattatagtgccttggtaaatccaaaatgttgttatattttctttctgttttttttttttttgagacggagtttcgcttttgttgttcaggctggagtgcaatggcgtgatctcagctcatcgcgatctccgcctcctgggttcaagcgattcacctgcctcagcctcccaagtagctgggattacaggcatgtgccaccacgcccggctaattttgtatttttagtagaaacgggctttcttcatgttggtcaggctggtctcgaattcccgacctcaggtgatctgcctgcctcggcctcccaaagtgctgggattacaggcatgagccactgcgcccggcccatattttctataatatattttttggaagaactaagaataccttaggctattaatttttttttaaaattaagttctgatatagaaccctaggctggaaaggaataggaggtcaaaactcttgtggactgagtccttgcctcttcccgccctcttgaccacacctctgctcctagccccagccccaagcatgttccagctcacaggcttccaccagtttttcatcttaagtcagtgttcctgtcgtgtcatgtaaccgagagctgtttgttcttctaagttattttgccttaagaattagataaatcacctctagtttaccctagacatgattgagattttttaggtttttcaaaaagaacattatgaagaaaataaaagggagaaggggctgttaacacttcaagatgggggaatgcaaaagaagaataactttagcattcaagatgcttattctcatgtaattaggatacagtcacagctggtctcagcaggagcactgccctccctttattttcttcagccctgtgtaggaaaatcctaggcagaattccccttcactgtttattttcggggcattcccctctcacctagtacttcctagaccgaggaaaaggatagacaactgggttgtgtacgtggagttattttggcttcgaggaattgcataaactgatatctgaggacagagaaatccataagggggaagtagaggaaagagaggaaaattggcagatcatggaggtgggaatgtgagaggtgtatgtatataggggtatctgttggaggagtaatcaaaaaaggctggacttgtaaagtagggccagattatgggtaactttcaggggcaccttacagagttaagactgcaagcatttgtagaaggggggtatttccaattttgcatgtgcacaatagaattattttgtaattaaattttttcccaccgatttcaacataagtttggaatcatcctgttccatttcacactgaagtgttgagaggttatgccatttgtagagttttgttagggttatgttcagagatcattaatttgcatttgagctcacaggggttggggaatttgtgcctgacactgtttcatagttaatatgttgggagccaggatacagttttaacagtattcacttgaatgcagctctggttccttttgtttaaaatttggattaaagtgcaaatcaacagactttgggtggtctcatcctcaccccgtagagaagcagatacatatgaccaaactccttcactatttggcaagacagtagtctcttctctcatgagatactaaagacgagaatagcaaggacattagaggtcagtcctgaggtaggttgccagagtttatttgagggaaatttgtctgaaacttgctttcactctccagcctcaactcatgttcctagttgtttcttttctataaaaatgaaaaattatgaaattttccatgaaggtctcagaggaaaattaaagaataaaataagaattccaaagggtttcagaaatgtcagcaagtaaaagagcaagcagtactgccttctccctagtggtggccctgttgggactgcccacctttgccgttgtaattgctaggtacgcttggtgagggaaaggtctttgctgtcattaaactttgaaggaaaaagaaggtatgcactcatctaaaatatatgtttttaaaaactctatttcttggacagttctttagattatttccattcatgttcaaaatttctatgacataatacctcagtgttttccaaaaattaacctctatggttgaactttatgttttttattacagcctgggtaccctgcaagttcccagagtgtgtgtgtgtgtgtgtgtgtgtgtgtaagcacatgtatgtgtgtgcatgtgtgtgtttgtgtgtgtatgtgcctgcacatgcacgtgagagtggggagcattctctggcatttggtagattttggttgattcaagcaacaaacctagtggacgcatcctgtctatggttcattctttttaactttcctattgaacttgtcgtatttatctgttttgtgtaggctttaagtgcgttagaaagtaaaactgtaaggaatcaaagaggagttacagatcatgctcatctgcagggctagtgcttggctgcctcccaggtacacacccctattgtggtacatacctcattcattggtttctcatagatgtcctcctgccaaggggtagatttcgcttgaaaagcatctctctggagagcctctaacaccttttttggagtgacaaacccatactgagcttccagcaaagccaggtccattttttcagcctttaaaatgcctatgacctcatctcgagcctgtaggaacaaaaagtatttcagaaagcctgctgtctctaccagcagtctcagcaagtgatttttgtgatagttggcagtgctttttcttctctttcaaatctaaatgaatcatatttcattttcacacttttataaaaggtaacaaaactatatcccttcatccttcttgtagtctaattacacaattaatgttttaaaaagtgattactatacaacattggaggactactttttttattatgtttgacaagcagatatcatgatatccatcaatgtactagcatttggattttcagggggtaggaaataaaattctcctatatgtgtaccagctgtttttagattttcatgtaggttaataatgccagggctagtctaggagccagttcacttggggtacaaaagcacctattgttgtttaaaccaatcccgaagtcatctggcattattgctactgatgcatgcatgtgcactgaagctcctgagcagcatgggcagaggatgtgacctttcacgacctgtatgccaatcacatgtcatcatgacagcccctttagatgggattaattgcactttgagttggcagaggagaattctttgtatatatacttatgctttgctttcatgtacacacatgtatgaaccacagatatctatttctgtggcagcaggaacaccaaattcacaagcagccttctgtttgaagcatgatggggataactccaacccagctgacctgcagttctccctccagaatgctgaggagaaataacaggtcatctcttgagaggtcttctgcttggtggccattaccactgtgtggcttctctgccttgggacacggaagtattacatccgactcactgggggagtctttgtcttgctgtctatgcttcatgtttttaggcccttggaaactgtggcctttagtatgtcttggaaatttcttttgggctgagccctcggtatcactgcctctggaacgcattctttaaagcctggaaggagggaagaaaatttgtaaagcttaatggaaatggagttttaataagagtacctattactgctttaacaagtctacattcttgttatatttaccacagccccaaagtcaatctttttgatgtctacagcagagaaggatattagcagattcataaatcacagtcttatttgcacttctgcttttaaagcaaacatttaaaaaaaggtgttctgtcttgattaaggccacttatgtccatgggtaaacaggctgtgtttgaacttcatcccccaagcattccacctcaggaacccaggtcagacctccaaccatgaccctaagtgcttgcttaagacgtacttaacataattataatattgtaaaatggtgactttgctaattcttctaactttcttcagatttactttatagtatttcctttaaaattgttgggagcttttatggggttttttgttttgtttttaaaatttgttagcctttaaaagtgcattaggacagaaatggcagagttactgctacagaattactgcattattttgttttgaaggccaagtctagtattaaaggaatgaaggcttggtccctggctgtattcctgtattcctgacattcttctaaaattctagatctatccttgggtaagtcaagggcttatatttaggaccctcatcttcaaagcggagatactactacctaacgtagttggccattctggaaacaatataaaataaattaatgtttaaaggacacattagctccacatctgattatataatcatccaaatgaatttataataggaagaaaaattcttccactgttgaggtttataactaggagagaaaatatcagttgaacttataattgactctatggcatataagcagattattaattttactctttgtccctacaaatcatgaaactttcatcatcgccagtaccttacttttagtttgtagtatttctttaaaaatctgaaaaactcaagtgtccagaaaagtatagaaaccataacaaactgctatatgctaccacacaaatttataaaattttaataatttactgtatattagaaaacagtttttaagtactgtattatagatgtattataatgtatgtatctcttctgaaaccccttctcctcccttcccactccagaagtaaccacgtaatcttgaatttggtatttatcattcccctgtatgtttcatactttttaaaaacatgtacatatatattgctgaacaatgtatagtattacattttcaaaccttatgtaaataccatattgaatgtatctttctaaaacttgctttttcatcctagattatatttttgagattcttccttgttctattttactgtagtttatgtattttgattgctgtaagaatatttcattatatagtccatcatttacttgttcattttactgtttttgaatatttttttttcagtattcaaaaaaatgctacttcaaacattcttgcacatttttttcccttgtgttaggtgataagaattctgtcacaaatcagctgtggaacttgattaagacattgacccattgccaggcacaatggctcacacctgtaatgccaacactttgggaggccgaggcaggcggattacccgaggtcaggagttcaagaccagcctggccaacatggcgaaaccccatctctgctaaaaatacaaaaaattagccaggtgtggtggcacacacctgtaatcccagctactcaggaggctgaagcccaggaattgcttcaacacaggaggccgaggttgcattgagccaagatcgcgcccggcactccagcctgggtgacagagtaagactctgtctcaaaacaaaaaggacattcaccctcttcaggtccaatgacctgatctggaagtgagggagcacttactatgtgtgctaagcattcttctcagcattttccatgtattagctcattcaagtctcacaacaacactatgaggtagggaatattattatctccattttacagtgaacaaatggaagcacgggaaacttattgaaggttgcacagctaataagtggcaaaactgggatttgagtctaggaaacctggctcagggacccacactcttaaaaatcatgccgtaatgtcattatgctgtattgcctaagacaaatgcatatatacactggtacaaataccttgtccgaaaaatgcctatagccttactgaagagactatttacaaatacggtatagatgaacaatgatgtgtgacagtagttgtcactggctcttccctaggtagccagggaaaggctcatttatttgagaaaagcaaaggcatagaagggatatttttgtgtaggaatgggaggttggggatgtgtaagagatgagattgggaaaaacctcattgtgtgtatatctatttatttataaaaatattcatgtactaccacagtatattatgtgctttataaaaaacattcaaaaaagacaaaaatgaaaaattatacataaacaggatttctaattatctttccccacccctattgtattttcttgaacacctaggaatatccttactctgggctatagaaataatggaaggttgttacataaatatatttaatataggtaaatattacattctgctttatttataggtatgttcacagattaattatagggccatctatgtcctttgtcttatatttttaagacaattttattcttcattcatgtctcacatggcgtatctgacctggtgctccatacataatgggcatgcattagggtgactggcttgctccttttactttgtgcccaactgtctcaggtacatgttagtgtttaacaaacaaccccaaaacttggatggaggctaaataacaatggctcagaattctgtgggttactccacagcttcagctttcttacagctattctgggcctggatggtctaagacgggctctcacgtatttggctgttggttagttggactaggagagcctcagccgggtcatctcatctcagctgtatgtgactctcaacttacaagaagctagaccaggcttccccacatggtggtctcaggataacattccaagaacgtgagagttgaagctcccaacatctcatttgtgaaagaatgtcacaatgtcagcccagattcaagattgaggaaatagattacacctctacatggaagaagatacaaggccacattgcaaaggaatggaaggaattaactgcagccatctttgaaaaagttcaccacacccacagattcagatttctgtgaaaatctaataaaagtctagtttaaaagaggagcgaaatatatttggttctttacttcttttcatttcctggaagtacatagggtttggtttttgtttttttcattttacatgatgaattcctatgttttcctcttgcccacatagtcctgtgtggaacaatagtctactgataagaatcaacttgtatcctgctgctaatcaatgagaatttctctgccctcatcaacttaatctaggatatcccttccagaataccaagataatgtaagcttttatttagcagggtaatttgctaaacattgttcataagtagtgcccttttagcttaaggcagccctgagctgcaacagaagactgaatggagctctgtatacattctagcttcctcacctcactcttaaagtgggttagatgaaatctggtaggagaacatagatcatttgccagtgatgatattcataagtggtaaaaaaaggaatgacctgaaacatttttatactgtgtttgttattcttctaaagagattagagttttactgagaccaccaattctctttggaggctggggatagtagcatcaacattctcactgattaatgaagtggtgttcacattggatttgtgaacagacccatcatatgcagacttctggtctactgaggagcatgtgtctctacatgtttacagtggtggagtttccttgcccctctgccaataaccacaaaatgatcagtaatgagaaataattaagtatctagaggaagaaaacaaagacatgaatttcatgatactctcatgctttgtattatcagtgacttcattgtttctcttggcaaatttttaatgcatctgtgcttggcccaggggtgcatactagggtaaagaaaaattttgtaatagcaacagtggtttgggattttcagggtaccaaaaaaaaaaaaaggaaagttgctttttgtgtatgccaaataatgatactttactcttcatgaagtgctgacctagtacctagtgagtttacaagggaaaaaaacctgcttagttgtcagtttaacacagcctaatgtgttgttatctgtgactgtcataaccctagaacgataaccttcaggagtgtaggctgggaatcaggaaacccagcctctgatcccagctctgcctttaattagccagggtctgtgttgttgcttataaaatgagaatactgggataggttgtcccatgagatcactcaggctggaacaaggaccaaggattgtttcctttgacctctaccctgttcctcaccccctgatggatcccgtgatagcagggttaggacctgagactggatgatctttgaagtcccgggatttcccgctttagaattctgggactctctgttgtcttgtatctatggatacaaatacagtgcagttggcagtgagaagtagatcctgctttgttttcctatgtagttcctttagtcagttttacttgggcttaagttagttgaaatcatggtgtatcttggtaaggatgtgtccatgcaagaggactagaagagagtttgtaattatttacttaatttatttgcaggaaatggccaaatgtaaatagaagtctattctactcattaccttcctccagcagcccctcagccaattacttattataaaatttaaattttaaaaatcattctttattaatgttgtatattaaaaattactctacatagttaggtgctacttagacatactttttagtcttcattttcttactcatttttgttttagaattgtggatgtgactagaggatatttttgcttgtatcaagtaagtgaaaagcctcaaaaaagaaatcatttttggtcttggtcatttaatatggtatcgaggtagccaagcaaaactactccaatttagagaaagaaaataatagtaataatggtagctaacatgtattcattacttatcatatacaagcccattctaaatgccttcctttgattaactcatttattttgcagaggaaggaactgaagcttgaagccttttttttttttttttttttttttgtgacagcatctcacactgtcgcccaggctagagtgcagtggcacgatctcggctcactgcaacctccacctcctgggttcaagcaattctcctgcctcagcctcccaagtagctgggactacaggcgcgcaccaccacacccagctaatttttgtatttttactagaggtggaatttcacagtgttggccaggatggtcttgatcttgaccttgtgatctgcctgcctcggcctcccaaaatgcagggattacaggcatgagccacctgcgcccagcccgcttgaagcctttttaaatcacttgccaaaggtcacactgctaaaaagtggcagagtcagagtcaggccctaatttaggcagtctggctccagagcctactaaatcactatgctgtatctacttagcttttataaaaagatatacatagtaaaggaaaaatcctggtttaacattaatttattcaacaaacatttatgaaatgaagccctactatgtcaagtattgtgctacgcaattttgttttaactagcttattttcttttctttcttttctttttttgagacggagttttgctcttgttactcaggctggagtgcagtggcgtgatctcgggtcactgcaacctctgcctccagagttcaagcaattttcctgcctcagcctcccaagtagctgggattacaggcgcctgccatcatgtggctaatttttttgtatttttagtagagatggagtttcaccatgttggccaggctggtctcgaactcctgaccacaggtgatccacccgcctcagcctcccaaagtgctgggattacaggtatgagccaccatgcccagcctagcttattttcatatgtggaccaatctccaatttgttgaattctgagtatccaaaattatacaaaaatgtgagtaacataaattcacaaacccctagcctttgagtctattcaataaagatgttctgttttcatatattgtttatgtgcaaaaactatgtatttttaaattttcatgtgcttttctcaaccactgctgtcatattgaagtggcaggagacatgtcttaatagaaagagtatgagattgtggaatcaaatagaactggtcttaaatcacagctccaacatgttagctctgtggccttgggcgtcagtgagcctttaaatgtaaaatggagataatggtacttgctaatgggtttattattcatatttggttagcacagggcccctgttgttaatgtgtgtatccccatgtcctacagagttggacctcagcagggatttattgagtgattgaatcatgcagtcctcagcagagctggttggctctgaataggagctgcctcatggtaaagatgattcatttgcaaaccactggctagaaattagaaaaagggtactgagaatctactgaagtagctgtgtatagacctcttaccacatgccaggcactgttttaagtgcttcagttcatttatcttatttatcttaaagaattttagcctgaagtaaatgaaaaaaacagaaaacctgtaggaagggagttggtaaaggtgaattaaggtggagactctcataagagatagcaaagacaaataaattaatatcaatttcagggcagcactggtgcctgcaaaaggctcaggaagtgtgtgtgtgtgtgtgtgtgtgtgcgcgcgcgcgcgcgcgtgcatgcacactcgtgctgggtggggaagaaatgttagatccacgtaacttactggaaatctccatttaatttcactgaattttgtaaactttcgatcataaataccctgatctgctatccctcacccccagccctctcacagacaccctcacatgcatgaaatgaactgagtatgcactacactattttttaatttgacagcaccattaaccatcattagttctgtttttaagcatgtaacattttattaaggcagtcatttaaacttagtgtagtgggaaattttagacataaattgtttgttttgatggcaagaagactgcataacacggagtgagtctgtgctaactgtacgacactcatggccaaggaacaaagctgggagtgatccaaggctttaaatttgaatatatttaacaccccatactttgctgagtttagagggcagactgtctgctatctttacatttgcacttgcatttccccctatctttacacagaacctttaagctaagatttagttccctgaaagaatggaaagagatgtattaagattatggggttctcagcagagctggttggcccctttaatattaactgacttatggtaaatgtgattcatctatgaaaatagtggctataaatagatgttaatagcgctcagttgcagaacagccaggttgtgctcacatggccagattaggggaaaaaatcctgttgggtattttatgtggtctttcaaaaaaaaaaagtttccttttattgccctactcacccacatttgaagacactaaactcagccagctgcagtaaagctatctgatggctaaaaaaagacaattgaaaacaagataacctaatttagtaattggcctccgttatcttttttctcccattttcagtaaaaatcattgaaacattttcttagtgatatttttccttgtagggcatagacaagtctttagacaagggattggaaagtggggatgtatgattcaggttcatattcccaaggattctaagtcctaagagaaagtcaaagccacagagagaaaatcaaataagagcttcagaaggtggtgcagtagtctctcatccatcacccatagtatcaggcacttagtattttccatcatcacctgctcacttgttatatgcctgtgagtgtccaaaagtgcttccttgttgtgagctgaaatccagctcccaggaactttagttcgtgtatcctggttctgcctccagaactaaagcaagccaagctactcttcttgccacagtgtagtcctttaaccgaaaggactctattcttctttattccaaatgaaacactcagtttctttattcatttcttacaccacctagtttcagtctcctccacccacaactcacaaacacattttgattgtgccccttcagcccagggtctttcttaaagatatgcatggaattgggtataatttcccagatattaaacacaactaaagcagtgaattggtgaaggtatatactcagggaagatcttagcagcttttctgatagtggttccagttggaattttaagtatggatccaaaaatttgatagtaggtgtttaatgaaaacttcttccagtttagcttatcaggtgaatgcttgtaatgatacctttcacatgcatgtttcttgatacatcaggagacagggtattatttccccagtttgcagattcctcgtctgcaagattcaggaatcttcaataattttagtttacaaacagtggaccacagataaaaagctaggtattctgacttttttttctctatgctcatgctaaattaattgacatttactctctttttagtttggaagtgttctttggtttcttgttttctacgtgctgcagtcagagaagctgctgggctgtagatacagaataaacaaccactgatgaggtccagtagggcagacttacatcatggcttttcttagctgtgtgttgtgaagaaaggacaaaaagaaatataaaaatcttcaagtataaatagtgatttatccaagttttccattacaaatcagtgactctttaaagattcttttctcatttaaggttgaaacagggctgagaatgttttccagatctttgtggaatacagcagaaaaaggaaattatttttatgtagtccaagttaggtttaaatgcatttttaaatgccacacttccaaccctagatcagagctcttgaaaatcatatgattcttttaacagttttcaaactacatcactttccatatttcttccaacttcatgctctggtttttcttagaaatacagtgataatgagccagtcacttaacctttctattttctttgaatttttgtccgtttggaccttggagccagttttgtccaatccccttacactgtaaccaaatcccagcaaggttaactgatgtgcctatggtcatgccctgagccaacaccagaaggcaggtctcttgcctacatctctgttgttctttccattgtatcacttcttgttcataggccaacccctgtttcctccagctctaggaagatgtgaatcctaaaagataaaaatgcacctttcagagaacccgaaatttcctacaaatttttatttttgtgaaccatcttcctcaccttttaggtaacaatagatcaccctgagtgccttttggcctcctcttgcctaggccaacccagcctaataaggaccttgaggtaaacaggtgattcagaggaggtcaagagtttccatctttacattccaacgtgaggtcttccctttctttcatctaaggaactgtgactagaatagagatgggttgttgtagagaagatgttgcaactcttaaagcgccttgggctacccctaacttctaagccatttggctcccctttcccagcatctcaggtatactccatttatcttcctataactggcagaaagtttaataacttcttgcctctgaagcatataagtttagtctgaaacatttgcactttctctttttaggggaagagagggaaactaacttttctaaagcttctgtttttgccaaataatacgattcattcttcctattccttacgtcttttttttttagacacacggagttgatattattctcttcaatctactgatgaaaaaactgaagtgttataaagctcacagcttattatattaatagtagaaatacaggttcacgagtaaatacaaaatactaggaaatactgtaaataatgttcaatgcacaaagtgttttggaaggatttgagaaagaatgactaattctgccaaagggccttagtaaagccatctcagagataagctttatcttggagaatgaaaaagggttcccaggccatatgtataggtagaaggtggatgaaaaacacagtatgtggggaatatcaaattgtgcctatgctgaagcacaggaggtgttcaatggtgaaaagtgagggcagaaaggtcaactgtgggtatgcatcacagggctgtttataataagggagatgaaacaaccatgtatccaacaaataatagggaataattatatggatcatagaatatcagtgcacatattctgtggccagtgaagcagccagaaaaagtcaagttttcaaggagtatttaataatgtaggaaaatatttgtaatttgtaataagttaaaaaatttggaaaaaatatattgatttatctattatattgttttcatatttgtgaggtgtttttcagaagagaaaaggggatgaatgagataaaaccttgaaattgatcaacaatgcaatagcatgttgccttgatagcagctggtttgattatccatgaggtgggaaaagaagactaaggaaatttgaatgtgaactataaattaggtgatattaagaatttactgttttcaggagatctagaccatcctggctaacacggtgaaactgtatctctactaaaaatacaaaaaaattagtggggcatggtggtgggcgcctgtagtcctgaggcaggagaatggcgtgaacctgggaggtggagctttgtagtgagccgagatcgtgccactgcactccagcctgggtgagagaccaagactccatctcaaaaaaaaaaaaagaagttactgttaatcttattagatgtgttaatggcattgtgtttatgtgaagaatgtgctttttatttttccagatgcataatgaggtatttaaatgtgaaatgacatgttctcctgggatttacttttaaatactccagaaaaaaataatggcaggggatagaggtgaaataaatatggcaaaatattgaggatctctgaagatgggtaaagagaacatgggttttattcttctttctacattttgtatatttggaaatgttcataataaaagatttgaaagaaagcactaggcacatattggatacataaacattttaagaagtggtttccttgccagtcgccgtggctcacgcctgtaatcccagccctttgggagaccgaggcgggcggatcacctgaggtcaggagttcaagaccagcctggccaacatggtgaaaccccgtctctactaaaaatataactagccgggcatggtggtggatgcctgtaatcccagctactctggaggctgaggcaggagaattgcttggacccaggagacagaggttgcagtgagccgacacagtgccactgcactctagcctcggcgacagagtgtgactctgtctcaaaaaaaaaaactgaaaaacaagaggtgattttcttaaaagaaaaaaagagagtgccatgggggaaaggggagaaaagaagaaggaaggcaccaagcttgggtatcaggcatagacagagaaacaggagagtaaactatgtcccaggagccaagagagaattatttcaaggggcaaagagctgctgtgacctcattttaacaacattaccactgcttagaacaactttggacctccacttttggagtcatctgctttgaaatatccctcagctggggcaaagcctgtttctttaaaggcgaacttaatttctgataacaagaacaggttccttaaaaacaaatctagtgaatctagtggtcagctcatgcctattttggtcaaaagaaccaattatgacattaaaataatgggactggcttttgtgtgtggccttcaaaggaggtttgaagacatttccaaaatgtgtcagccctgacactttttcagaataagcttcataagataaaaccttcaataacattacacatttggattaataactccgggcttttatttttcatattccatctactttggttaaatgttaaatcttgccgggtatggtggctcatgactgtaatcccaaaactttgagaggccaaggcaggtggatcatctgaggtcaggagtttgagaccagcctgaccaatatggtgaaaccccatctctactaaaattacaaaaattagccgggcgtggtggcatgcgcctgtagtcccagctactcgggaggctgaggcaggagaatcgcttgaacccgggaggtggaggttgcagtgatccgagatcacgccactgcactccagcctgggcaacagaatgagactccgtctcaaaaaaaaaaaaattacatctttggtgtcttggagcttcagtctattttctataatccaaatataagcaaagcagtaataaacagcatggtagacagcaggggaaagagcataggctctggagtcggcctggccgagttataatcttacttccctcgcaacttctgctgtccaaattgggtcaaactacttcatttcttcagggctcagtgttttatagggttattgggaggattagagatgacacatacaagatgctgtgcctggtacctagaacatgataggaactcatagcttatcctaatggagatgtcataatgatacaactttatctcttggttcagcagacatgccttccctcttagaacatcaaatgagataagaaaataactagtggatttttagcatcatgaggagagtacattactcaggccctacctcaccaaagggagggagttcttctagtcagtgctaaacaagtattttaagagtgtgtgttattttgtgcctaactgagatggagattggcaagctgaagaaattgggatttggccaagaaccagtgcttgttgtttagtagagaggtgatagggaactatgatcctgccagtttggagggacgtaacatgaaatgacttcttggtccaagctggctacagctgttccaaaaaagatgacaaaggctgctgattcagagggggatactcacccaggctgtcacgtctgtctctccaccaagcaagacttttttaatcctctaacacaacagcaacacaaaatttactgtctgcaggcacaatgctaaggcactttgtgcacactaaatcgttaggcactgaaaacaaccctgtaaggtagtactctgattcatctgcactttatgggttaaagtaaccgaaacctaaagaggttaagttaatctgccccaagccacagaactggcaagtggcagaacaggaattcaaactggcttcagagcccacccagtctttgcaagcctactttctaatgcctgaattccttctctttaggaagaattatctgtgtaaagttgggagagacatctcagcaattatggtgcagcactgactatatcaataaaattaaagtagccagtatctttcaccaaagacctgcatcacaaagtggtgagaagagaaaaaaacatagatcaccagggagaaagggaaaaagcctaggtttggtcaaatctgcgatgaaggcacagagtgaattaaattcaagcttcttcactactgttcattattcggctcattctaggcagtagggagggagttgttataaagcaggagcttataacagcttttagactctgcttaagtcaaaaatcatcaagaatcatcaaaaagcatcaaggaaaatacacagaacaagcagtcaccctgctgtgctctccctgatgctttttggtggtcatgtggctgtgactagaccctatgagttcgggttaagtcctgggttcttcagactgataaaaggtttcttctcatgtcttcctctaagaagggccatctccaccctttccaaagtcccactcatcgctacgaaggagtgctttccccatactccctcatgaggtgaggttggcttacccagactgcttcccagccttgttgcgtagatctggacctcagactctctgaggtctgtggtaatggggatagattgagcttgggggttccacccactgtgtgtggttccatatagccctttgttagaaagcacccagggcagccaagagtgcgtgttgactaaggagggtggctgctgctaggaactgtaagtaaataaatggatgtcagaagcttacaattaaggagggaaacaaagaatcattactctcccttaagcatgttgctttggatgttttagcaatgattatgaagcatttacacacagactaaactaagctctttgtgttccttgcaaggtagagagcctgccaagtcaatttcagcatgcaaaacccagacaattattttggcatttaggagcagccactgtttttgctaggggttgggggctggcagcctgttgacacaggaagccttcataaggaaagagaagtcaactttaaccccaatttttttaaaaagagaaaccctgtcagggctctcacgttcccacctcttatgcgaaacctcttgtcacagagccagtgggagaagcccttgggcttagaagtgccacacatgcttttgtgtccacagcgtgcaactcattcatagctgttttcatatcctctgcctagcagctcttttgtgagtgtgtgcatacagacagttggtagatgtatttctagtaataaccaataaaaagataaagttcttgaaattatggtcttggttcatcagataatatatgctttatgatagtcattctcaacctgtaagcccagaactcctgggagctttcagagttgacaaaaggggccctgcaatccatatagcaaaagcattttaaaaaattgggtatgtctattacatcttcagaatagccctggatactattgtgattgatagcttataagctgctttaaagttttctgaatttgttataggcttttataactatgtcttcactcagtcaatgaatagaaaaagctacaactatcaatggagaatttggaaattttttgttacggaaaaggagttttcatcctagaaagggtgtgtaagcagtatccaaaggtcttttctgtgtggctgctaaacaaaagactgctttcttattattgaaccttttggtagtgttttctgacacaaatgatttcatgtctgtatcagaactgccctgttgatgtagctgcagctaaagaatgggctgaaggcatttggtcttacagactgttaatctgaaaaaagcaaatgatgccattttttttagtgttaagactttatgcatctaacccactctcttcagtacaagttaccatgcacatcataattacttgaaggtatttgagggatgattgtagtttaacgtggtggtggctacatctggaggcctgaatccacagtattcttatttttagcctttagtagggactgcttcttccagtatgttggctgcagtatttaaagtagtgatttgctggctctatactacaaagtaccaaattgccaataggcactgtctccatcaaggatacagtcatttgttgcacaggtgctaacagaggtgggcggatctcctgaggtctggagttcaagaccagcctggccaacatggcaaaaccccgcctctactaaaaaaatacaaaaattagcggggcgtggtggcaggcacctgtaatcccagatactcgggaggctgaggcagggagaatcacttgcagctgggaggtagaggttgcaatgagctgagattgtgccactgcactccagcctgggcgacagagcaagactctgtctcaaaaaaaaaaaaaaaaaaaagtaataatatattcagcactgaaaaatggggaagcaggcacaaagaatttttaaaatttacctttaattcaaccacgcagagatttatacccttgaccttttgtatagtttcccatagactttcttatctttgtatctgttatactatacatattgtttagggaacattagctattgtcataaatcttccataccatgatatttgatagctacatagtatttcattgtatggaggtgccattatttatgtaaccattctcctattattggatatttagttaaccactctccagtccttcctgccccacccccttcaccttagtggccttttccctatggatccagaagggacccagagctaaaaaggaaccttgactttgtctggacttcacaaaactggcaggagtccatgagaactgtcctcggctgagaaaaatatctgttcgttgttttaaagtcatgatgacagtggctgcaggatttaatcgcaactcataatcattattctacctcccctctaaattctttttcccttaccaaataaaaatataaaattgttttgaatacttttaataaggtaaaaagaaaaatagaaggcatgtatactgctggggtagaccactatactacctttctaggccctgaaagttgagaatttgaaaatgaaataagaatttagaatatttgtccaaataattcatctttaacaataggacatttatttgcacattttttcctttcatggaggaagctgttattatatttacagattacctcatcatatagacttgaataaaaaatatgagaatcagacctgtagagcatatttcaaacaaaattaaaagcagagctgtgtagacaatggtggtggtaagataataagtattttttattctaaagctataacattctgtttctgatttatagagtatgtcatcattttaatgctgtcttatgtccaaaaaataagtagttaacagtagtgcattagaaacatggttaccaaacagtataccaaaaactaaaacattgcatggtataggacatggagagaagaaccaaagtttgtttagaaaagagagtctcaggccaggcatggtgtctcacacccgatcacttgagccccggagtttgagatcagccttagcaacatagtgagactgtctctccaaaaaaataaaaaaattaaaaaattttttaaaaattaagtaaaaataagaaagaaaaaaaattagctcggtagggtgatgcacacctgtagtcccatctactcgtgaggctgaggcagaaggatcaggatcacctaagtccaagaattggaggttacagtgagccatgattatatcatcactgcacttcagcctgagaagggggaggggaagggagggggagggggagaagaaggagaaggcgaaggagaagaaaggagggagagagaaagagaggggaggggaagggagagagagaggaaggaggaggaggagggagaaagaaagaggggaagggaagggaaagaggaagaagaagaggagaaaggagagagaaagggagaggaagggaaagggaagtggaagggaaggaaaggaaaaaagaggaaaaggaaggaaggaaagaaaaagagaaaggaaagaaaaagagaagaaagaagagagcctcagaatcataagacatcatcagggttggaaggatctggagattgatttgccccactccctctcagcaggacttagagactggacaccctcattgtaaactgcacactgtaaccagcacacatccatactatgaggggtctttttgcataactgtgtggtcttaaaaatgtggccaattctttcaagatatatccagaatcctttagccattttatttcctagcatacagctgttagttgaatgccacctgacataaattttggtgagtaaattccaaaaaaaattgggaggaatatttcataaatgtgaaagcaggataaagttcccaaaaatctgtgagcaagtagccagagtgatttattgttaagattataactaaagaaaaacttgccttgtaacctcctggttctaaaaatgctgaggctaggcctacaaaaaaactttaggctggtttcctcaatttttattttgacatatttgtatgattcagtttgtttgtttttaataagctaaatttaaataaaaccctccatagttggcaactggcttcttggttaaatatttaaatatacttaggatttttgttcttcagctctgtctaaaaagtcagttgtatagtagttctttacttgaggaagtcaggaatgcataactgtctgtgcttccacgtatagtcccacctttcaacaggcaattttactcgcagtacgttttatcagttgaaagaaggaaaaacaaacaattctatagcaaccttggaatctttctcagggcactaacatggctgtatttcaaagtacttaatattttcctaagaaagacaaagaagtgcatggtgcttatgttataatttcctaatcagaaaggtacaacaacacttaaaaggtgattagagttgcacaatgaaatatttgtagtggttcttttagccattatgtatctaaagtagaatttttactttttggtcttctaagttctgagaatcagaatgagacttacatgtagaaataattctttgatttgttcatattttccttaaaatccatcacaattattaccaaggacattcttaatcagctgtgtgtgtgttagggaggtatcaggctgagttgttctgttgctgctttatacatattcttggatatcattaattatttcccagaataacctttactttcataatcaaaggtatgcttctaccttcgactttatatgtatttttggctacctgctaaggaggattggggacaaggtcattttaaggtgtcacttagtcacttggaaccattaggttagagaacaaaagtaggtaaagtttataaagcacaaggagccacctactgtaactgtagataggacttttttcttatttacttccttatctatattttctcttgccacttgccctggtttctctgtgtccatgctatgtatcggaaatagactatattactggaaaaggatgatagttataccagagctcttactaaatgttagaaatttttacagcatctcatttaatcctaacaattctgtgatggatgcctgattattcttatttctatgggtagggaaatcagaacttagaaaagttaagtaagttgcccaaagccacaaagttaataagtggcagggccatgatgcacatgtcctattcctgagattttttcacttctttatattatcttccgttttcactagtctcccctggtgactttccttccttttcagctacaaaatttcattcatcggatagtatacttgaagttttaaaatgtgctgttcccagcaggaagtggcccatggctgtatgactatccccactcaccatttccaatattcgcctccccagacagaaagaggaatggaggcagcccacgattctctttacacgtttcatatattcagaaaaagctgtgtgttaaattctttgttatgttttccttttgctttgtgctcattgaatatggtgctggagacttaggtaaatattcaaaacagagctatgtatttggcccaagattaaaaggagagtaaaaataaagagagagagagagaaagaaagagagaaaaactgatcacggagacagtagtagctggagggaggggaaggctgtcacccagggattattgggtttgactctgcccttggaataactcaaaacttgttaagagggatccaagccctgcttggtttggcccacagtttcacctcatgcccctccctttgtcactctttctgcacctaacgtgctggccttgagttaagtcacttacacttaactattttctctctcactcataggcctttgcctgtgctgtgctcactgcttgggcctcttccctcagctgttcactcagctaactcccacttagccttcagccctcagctgatacttcctggagaagtcctccctgacttcataaccacattatacactctagtagcactaagacctccttcttctaccagtaattacagtagctattttacttacatctatattattatctaaagaatttcaacctcccccactgaacccttagtcctgtgggtacaggacgtggtctgtttgctcacggataccttgcgcatagtatgtactctgtcgaatgaatgaatgattgaatgaatgaggttgtcttgaaagtcatcaaatgatgagattttgttttagtccagtctccctggtaaaaatcgcttggacttgacctagtagagctcatgtatttgcaactctgtgagatagtagactaagaaagatgagaaatagtgatgaagcaagtgtttttgtaccatcattgctgcctgaccacctcccccaccacatatacacagtccccactatgttgggcttggccaccttatgtctcttccctaatgacatccagtgactaattgacccaataggtacccttagatcatgggtcagcaaactctttcagtaaggagccaaacagtaaatattttaggttttgcagtttctgccacaactactcaaactctatctttccagaaagcagctatggaatgatatacatgtgaatggctgtggctatgttccaataaagctttatttacaaaacagccatattttgctgacccttgccttagatgaggttctgaagtaatagtgagagaacctataagtaagtcaatctgcaagaatacctgcccccacacccttagttgaaatttattttaaaaattactgtttattccagtggaccatatgtaactgcacatgtgacctagggccaactctgaagctgttaaagagaatatatagatttggcacaggcatcaccagaggttgttaagagtcgcacagaccacagtctcctatagatgtgtttttttttttcgttgacttaataaggggaataagggtcaatttctatttgagatctgatatagtctctgatcacaaaatttgtctcctaaatcaaattagggcagtttcaattggattattttggcttaagctagacatctaaggtattttcataatgagcaaattatcactatacaattcaaacattttcctcagctgttcttctgccagtcattatgtctgttcaagttgaggaaacagaataattttctggctgatcctaccccagccccaaaaattccaactctgagaaccagtgtaaagaattcaggatctgtgtggagttcattcatggttggcttagtcattgtggaatagaagccacaaggaatggatcatttacattctcagtttattaaacttctggtgctagaaaacactatgctttggttcttataggcatagatacacggcttttaaacacatacacacagagagaaagagagcactgttcaagaagcatgaatttcctctttctaccctatatttttaaataatatctatagtttactagctttgagtgaagaagggaaaaaacagaaacagttattattaaattgctcatgaatattcctaagaagaaacacaagaaaacgtgtcttacagattttatttgaattagttaaggataatttcaatctttatatgttggattgtttttctgcataatgaaaaaaagaatgctatagaggtatacccccaaaatgggcaatggattgtagatagttttggaaataacccagaatatagcctctcattgatttggtttttgtcactgaactgagtggtctctgaaggtggattttctcatgactgttccttttctctatcaagtgccagaacttttttaaaaattgtcatcttgataaaaatatattttaaagtaattcatacttagctgcatacttaaaggtcaatgctatgtatataaacagcatatgaagtattaaataatattatctttttgtatttcattttctacttcctctgtgttgtcaacaatcatttatttatattggttaagttattggttaagctataaccaatcgtttctttgttcctctgacctgcttctaccttctaccctatgtctagtttttgcttctagacatagggcaaaccaatgaaattctaaggaagtagaatttcttagactgagaaatcagataaccaatgaaattctaaggaagtgaagtagtgcagaggttctgagggtgcagtttgaggtacagatgcctttatgtcactttgtctggactggagttgtataattattatgtcctaggaaggtggcagttgatctgtctctatttcatgccacgttggaccattttacctttgaatggggtcctaaatccttgcatttttaaagaattcaataaaatccaaccagtcttttctaagatgactttgtgagggctgttcctattgtcttgctaataggaagatgctataaatatatttgaaacactgattacttgtcatttctactggaatgtgcttttcatagataatgaaaccacagtgatggcctttcctagaaactcagtctatactgacagagaactgcccaaacagtccacataggcaattagctagcttattcagttgtgccctttcatgaggaatcctgtcttccttgatccacaaatagtctgcccatgctggaggcagaaggcaccaaggcatacctcccacactgacctgctctgtggttgaccagtgcctctcttcccacattgtaagtctcttaaagctcccctgcagtcttcttagaagttgcattccttatttttgttgcacccttaagagagttaccttgttgtacatgtgaccctcaaggaggagaaggtggtggcatctcagtttgtagcagccttaggctaagcaagctgtatgagggctcatctcacttaacacttcagtaactgtgaggtacaaatattggtcttcatatttcacaggtgacaaacttgaagatcaggaagctgaagtccatgcccaacatcacatagctaagaaatagtagagctgggctttgagcccaggtcatctaattccacagcccaggttctctctgataccccatcctgctgccaagagggagtataatattcatgctagacacactttgggccagtatctcacataataatccagccacactgtgagataggtatcataatggctcccagtttaacacaaacaagggacattaggaaacttgatgacagtcactcatcagttaatggcaaaaccagaaaaagaactcaacctctgtttgactctcagtttctctaagcctcaatttcctcattataaaataagaataactgggctgggcacagtggctcacacctgtaatcccagcactttgggaggtggaggcaggtggattacttaaggtcaggagttcgagaccagcctgaccaacatggtgaaaccccgtctctactaaaaatacaaaaattagccaagcatggtggtgcccacctgtaatcccagctactcaggaggctgaggcaggagaatcgcttgaacccgggaggtggagattgcagtgagctgagatcacaccactgcactccagcctgagccacagagcaagactctgtctcaaaaaaaaagaaaaaaaaaagtcacaacagactgttaggattattgttagggtaaaatgaaataattgaagtgctaagcaccacgtctggcataaaataagcccacaataaatgttagcaaaggcaaaatcactttgaatagaaaaatcctgccattctcctctcatctgttttgcctcttacaaagattccattatataatggtaaatgaaagggtatcttctctcacttaaaacagaaaattagatcaagtgctgggtaatttgtctttcatcacctaagtgattacacaagtggtttcaaggcccctttcaattctatggctgtatcattctagcaatggggtgctgttttttctattaagaacctgcaggtcagaactcaagtcttctctgtagtaataaagtggcatgctcacacagaggatggaacagagctattagcaaaacttagtaaagactttgattttcagagttgtaaatgacaaggagtataaacagagacctacggaatatttgtttctcatggaaagatacctacaacatttttaaaagatgaaaacaaaggctagataattgatttttttagcgaaggcatttaagaaaatatttgctttgtgcttggctctgggggataatagaagtaattattaaaccggaatttagtggcccaagttgaatcaggaagccagttcctcagaacagttcccagcaatgcttgagaactctaacaagatatacagccaaagccagacacttttttacttgtgaaagactgtgaaaaaaattaatcatattttcctggagctccgttagtcttgcctatcaaactctttgatgataatgaaataacttcctggagcattgatgatgaagatccttcagtgccaatgtatttaattgcttgattttacatagagtatggtcatgtaccttccttccacattagtgtatcctggaaggaaataagatggaatttcgaatggcctgttctccattttcacagattacagatattccccctccaggaaactacatcccatcccacccttgaattaaacgcatcttctctgttctcccatataacctatgtagacttcttacatagcgcttaccacattgttatgacgtatttacttgcctaactcccggacttgaccttggagtccttggctaggttgtaaggtgcctgccacttcagagttattcagtaagtgttcattgactgacacgtttttaagtttccagcttcaaatgggtcctgtcaataatagatttattcattccttattgcctctgtctcattgctaagccatgattccaaagctttaacactcttttcatgccctttcttccacttattccttaaccactctcacccttcacaaacaccttcaccttcctcacctttcttctttgttgctttccttcctctgcccccaacacctcttcacatctttacacatgttctccttttcctgtctttggaagtattgctcttggtttccgattctgtcccctccatctaagctttgtttgtttttgtgagatggacttttgctctgtcacctaggctggagtgccctggcatgatcttggctcactgcaaactacgcctcctaggttcaagtgattcttgtgtctcagcctccctagtagctgggattacaggcacccactaccacactcggctaatgatgagattatagatggggtttcaccacgttggccaggctagtctcgaattcctgacctcagatgatccacctgcctcggccttccaaagtgctgggattaaaggcgtgagcccccgcgcccagccacctccatgtaagctttggatcataagcatcgcctcttaaatcttgcccatcaaatacccccttcccttctgtagctgtagtttctttctcactattggttctttttccacaactttataacacgcccagtggtcccactttctaataaaatctccctttccctgctccccactctgccagtttctcttccatcttcacattgcctgaattcattgtactcatctcctaatttcccacccccgacttacagtccagcttctgccctcaccaatggcttcctaatttccaaatccaggaacctcttcttaaagaggtcttcctacctatttctgtccagggctctagctggatttaataatgctgtctttttcccagctgcccaagctagaaatcttgatgctattttgtacctcctcttaaccctgcttaacatactgtaagaataaaaatacttgtgtttatgtttgtacatttattttttatttgatatacagcaaaaaaaatactgtatgaagtagaggagtgacaaaacattcatcagggtgatctgatttggcagtgaaagggccaagccggtgataaagcatggaaagtagtaacagcagcgaatgaaccacatgcattgtatgcatagcagctattcttaagaattctgatttccacatattctaagcattaacagaaagtatttagttgaagaaagccaacccaaccaagacttgaagccagaatgttgtttttttcacaaatagttgtgatatttttgaaatgctaacacaaaattatgtatctacacatatgtgtgtatatatatatagagagagagacatgaaagatcctcattaggtttctgtgtggtaatatcatcagacatcttttaaggaacaaaacagtgctcttaatcacttctttaataccgtaaacagttggaattttcaccctctggggcctcctatgaacctctgcagagtagttcagccgtcagactggaaattaagctaatcagtagttacttggcacttctccttttctcttttctttctttcttttttttttttttttttttttttttttggtgtgtgtgtttgtttggaacttgtttaatgaaaacacaggttccattcagtgatataaagcagcacatcacaaagctttttcacacatagcttgtttttagttcttaggcctggatatttgtatgttcttaatataggcctaataacagctgaaatgtcattttttagattcaacaaaacctgtgtttggaacctgtttaatgaaaacacaggtttctttcagtgatatgaaacagcacatcacaaagcattttccaagatagcctctttttagttattagggctggatattcatatgtttatataaaggctcaatgggctcagaaatgtcacttctttttttttttcaatttaaattaatttaattttaatttccaggatacatgtgcaggatgtgcaggtttgttacataggtgaatctgtgccgtggtggtttgctgcagctatcaacccatcacctaggtattaagccctgcatgcattattattattattattattattattattattattattattattatttgaaggtaacatggaggtttagtttgaatttaagagaacagtaacagaaagggaaaataaccagccacccagggtctatttttaactgccacggcttgagcagagccatgaagagagagaactagggcctgttaatgccagccatgaaaaagctgctacagtgggcagtgtgtgactgagcccagcaggaaagtgcttacatagcactcaggcccacctttcaaggaccatgcaaagaaaggagacatttgagagccaacaagaattataacatgtatgtgccacagaagggtaggaggaattccacggggaaatggtcacatgggtctacggttagtagaattagacaacatttcagaatacacttccagtgaagcttggtttgaatcttggtactcttgcaggagaagaagagagctgggggcagagcaggcagtgtgaggcatagaggcatgagccagcagggctccttcagggaacagcagtgtggatcatggggctagagcttgaggttttggagaggctggtgatgtagtggaacaggcagagaagggaccagaggagatgtcaaaatgaactggagatagctgtactagtttggcatcttaaagaattttggctttacacttaggcagtgggaagctattagttgtctctaagcaagttttcttgtctctaaaatggaaataatgagctctataccactggattcttgtgtgtaaaaacagcaaattatcatgccttggtaactatttgttccttcatttttttaatccgataaattattgaaataggttataaatgtaacagaatttgaaaacacatcaggatatgatggtaatttaaaaaaaattcattgtgtaaatgttcaagtagtttccatttttcccaaactttatttttattttattttttgaggcagagtctcactctcttgcccaggttagagtatagtggcacaacttcagctcactgcaacctccaactcccaggttacaagtgattctcatgcctcagcctcctgagtagttgggattacagatgtgcagcactgtgcccagctaatttttgtatttttagcagaggcggggtttcgccatgctggccaggctggtctcgaactcctgtcctcttgtgatctgcctgactcagactcccaaagtgctgggattacaggcgtgagccaccgggcctggccattttcctcaaactttaaatattttattttctatataaatattaaaaagaagaggaattaagtcatttaatttgtgtgtagctctaattcattacatgggttgtatcaattttctgagccttagttttccacgtgtataatttctttagcagtctgataaattgaatttagtaatctgtagaccaaaatgctatagccttttagagatggaacaaaattagttgtaataaagatgcttattttctaacagactccaataaatagagcaataatgagtctccactggattatcacattagctcccagaggacatgggataattgtatagaaaacaattaaaggaagggattgtactaatgtaatttttttagaattacccaacagtaagattatgagcatggttcttgactgagccccccagcccactcagtgtagtaggactaaaactcagaccactcccattgtacaaaggagatgcattcaatgcattcagatggctaacatctgtcacttgcagaaaaaaagatgggagttaggcctagctgttcctttcacctttcctcctttcctgcctccctccttcatttataaattgtctaaagtgtgtatagcattatgcctctcaatgttataacgattggctccatcccgacctgggttaagtttaacattgaaaaattagtggtagctcacaacctgccaagtaccggagagaagtagttcttttctctccaagatgtttgacatcttggaaacggcagtttctgtgtgtttttctagttagagtagccacctttacacacctagtttttgttattcctctcaacaacactatgaggtaggttttaggatccccattttacagatgaggaaaacgagggctccaaaaagttaagtggcagaacctggatgtcagatcaaacactgtaactcccagcccagccctctttaccacagctgctcctcaattaggcagcccaagtgtttgtccctacccacaggggaaaaatcaaagattttgaacactagtagaagcaacattctgattaggaatataaaagattacagcgtgaagtgaaataatctccctcctcacctcctgtaggtcttgcccaaatcattctttagcatcttcttctatccctccctcctacagtctttttacctgcttcctaatcattagattgacatctcaaggtaggggagaagtaggggagtccagagtcctggtactgggattgaggggaggaacactttcactttcagggctattgttcttgctttcctttgtatgaagtagtattttctgttattgattttatgtttacttactgtctgaattgaatactgttaatttatgtgcccttggctctaaagctctggttatatatttttgcgttgttaatatttttaattggtgtttctaaagtaaatgtactctgtgtgtttggcagaccaacaaagtgaaatgtaaaaagagtctatttttaaaagtaaccatataaggtgaaaagtccctttttgtgtgggtgtgtgcatgcgtgtgtgcagatcgcaggttttatcaggaacatattcgttaatatttattgtcacagtttacagtgtgccccttgagtccctctggattatgcacagcccaaatgacgtaaccttggaaaatgcaataaatctaaagttggaaaccacttctaataggaagtttcttgaaagttgtaaagttaaattgcctcttccaggatgagggaggtggtgcggagaatgcccgaggggatccggacttgcctcttgcaggtgttatcccctgtgttggaatgctgggtttgtgggttggattattttgttttgttttgtttgaaatcctctgagtatttttttaaccccaatactccatggggtggcaagcttatatatataccttaaaatgtaacctttgatcatccctttatgtatctacaatgactcttatgctatatatgcatacccaggagcccagaagtataatttaattcatcagaatcttaactttgcaaggagacaggcattatgtagttcattttgccagcccatgtgtgaacccatccagtgacgtgcagctgaatactggtcaaagtatcccatgttttacattttaggacattctttgccatattattttggggagctggaaaggctcctgggaaccgatacctttggccctggtgcctctttttgaagctacttagaatattcttttataagtgatttagtctaaaaaaaattttttaagaatattcttctccttccaagacatttgtagatatttaaagataatgacaccgatcttgcctttccccctttctagatgtcaaacatctttaggtctgccaacctattttcttatgtcatagttcgtttgtacatttgtagagcacaaaccgggtatgcattagacacagctagaaactagggaagcactgagggaccaagtagtctgtgattcctgcccttcaggaacttctgatctattaatagcagagtggcaagggctattataggggccccaaatttagccttgctgattgggggttagggatgtcggggaaatttttctgcaggacacaccacacaagcaaagtcctgaagagtactatgagttacccaaggaagcgagatgaatgaggagaggaaggtattccaggaaggactggcttgctggaaaggctgaaggtgaggggatgcgtggtgagttcagggaagtgagggtggttcattgtggttgaggcactaagtgggaggtgaggagtggggaaaacagatgcagaaatgctagggcagaaaccagggctaacagtgggaagatgaggtcgcatgtgatgggagagtggaagatgatgggcagtcctcatcaggaaggatatttattgttctcttgggaacataattactatgggcaacataaaaggttctgcatgaggtcatttaggttttggaatattttgtatattatcttttgttgttagagaaaggatatattcagtcattagggttagacagatatagctctttcagtagcatgaccatttctccagcaacaatatgtttggagaaagaagaggaagagataatattgttttaacattcttatgactgtgagaaactttggtggcttttatacacaggattataattaataataacaacaacaacagcaacaaacacatatagcactgtaggcctggtcctgttacagtaagaaatagaatgtccacattaactctatgaggtaggtattatcctcagatacagttagtttaaataacttcccaaaagttagaaagctaagtgggagagctaggatttggctgcagcccctaagaacaaattgggaaagatttaagtcatagatgaagtactctgagggtgccttaagacaatggctgtagcctgctgtttatggtcacaactacatactcactggaatgttcatggccgagataaataaagcaagtattcatccatatttcacatgttactcacaggcattgctgcatggaagagattgctctcttgatggattttaggagctagcctgggttttaccagccgttgaggttgcttgcagccttagtttctctccctgccttctgccactgtcaaagagggtttagcctgcctacagagggtaaaataattaggataacagtgcaccagagaaagttcgaaatgctcttactcttagggaaacctttccaaatcaagccacttaatgctagcaaccatgaaggtatagttgccccagaatagtgtgtggttttccactagcagtgattttaccctagtgttgactgatcccatgtggtggatatatgcaggtaagtgcttcttgggaacagaagggatgaagataaataagagaaagtttgaagtcatgatccgtggagcctgtgctatataggaaaagaagtaaaaataagagtgggctgttatataaggatatagcacagaagtaaggggctgacggtctctgtgggtccaaaaagaagtgaagtgggagcaactgcttgaaagtattagaaggataagaaagaatgttgattgagcgggatatttacattttgtgtcagagaagacttttagcactcctctttgccttgatggtgttacctgaatatgcatccattttttttttctttttttttagacggagtgtcgctctgtagcccaggctggagtgcagtggcgtgatctcggttcactgcagcctcgcctccagggtcctggttcgagcaattctcctgtctcagcttcctgagtagctggggattacaggcacacgccaccatgctcagctaatttttgtatttttagcagagacagggtttcaccatgttggccaagctggtcttgaactcctcatcttgtgatctgcctgcctcagcctcccaaagtcctgggattacaggtgtgagccaccgcgcccagccacatccatttgttaatgacttaattaaaatgtgtcataacgaaaatgatcagtaggccaggcaggagctcccaggtacaaccaaggtgaagctgatttcacatgactttataatcttcaagcccatgtttgaatatttgaacataataattgttatgtgattaaataaaaacagagggcatagactcgttctgtggtgcagatttaccctatagacttatatgctcagtaggaagtacattgagtttttataagcagtgataattctatcttccaaatccattacgcttcagttagatttaatttttatttatcaatatttatcttgattaatgatcttacctctagctaggttacaggttccatgagaatagggacagtgtctgtgtctagtttctccctagcccagtacaaggcatatggtactcagagacttagggatttctaagtctcttgagtaccatatgccttgtactgggctaggtgatgtttaggatgggtccttaaacaggatcaaggccaaaccacttacattatagtgaggcagtcaaggtcctgacaggtaagtgatctgctcagggctcagagctaggtagtgagaaagcctgtgccaaaacccaaatctcattcctcactctgttctttgcaccatatcactctgacattgaatcaggttcttgtagtgatcttctctgtgtgtctagggccaaaaggaaatgtgtttcctaagctagagcttcccaacctgtttctcaatatggctcacagagaagctgggaatatttgtctagaacagtatggtaaacaaaggaggctttggagggcagccgaagaaagaggtcccctaggagactaatgcccagaaacctccaggctacccaagggggatcataccttcacacacctctcatctactatgctccctgtaactgtggaaaaactctttcctaagttaatattagatcacttgaacatcagtcccatagtgcacagatacaatagtttcccaggctttaagactctgtataaaaattgttcttcaaaccaaaaagaaacatgatccttttcattgtatttcttgaagtacctgatatacttagatactgctgtatctgtaaataaattatgataccttataaagttttaaaggaaatttacaagtgttattttctagtaattaccttgaaagattacattggtccaggaaaatgttttctgaagcaatgttaatcctactagccaagcatatcacttagtccccactgtgagatgagggatatgtgcttaaattgtgaaacaaatatatgagtcaggtatttttcctttgagtccaagtggtttatgactttctttcctgtgttctttgtatatgtgggagttttataattttttatcaagaatgaaaggttggcctgtgttcttactggtgcaggctgtcacatttctctctgttgcccagtcaggtgctatggcatgtgctgcttctggcgtagtgtactctgtggatgtaccagcatgttcttcaaggtcatgactgattttccagacctttggaattgagataaatgttaaatttgtagctatctctgaatttcttccagatacttttcttcatttgtttgtttgtagggtaaacatacctgatagcagcaatttaagcatacccttagaatgaccatgtatggccagtgcacctgaatgtgtgttccaaggtagggaatccaggaatggccaactcggagattcattccttactatgataaatatctgagccccctgctcatcctgtggaacatgggcttattggggattaaggccctgagttttaggttaaatgaaggttaccagatggaggtcattagggggagggtgttaaatgaaaatgctttataaactgcatgctgtttgcaagcagttgcagttttcctgcccagcccgcagccactggccatgcagtcatgttgtccagcctgccgccactggaccatttctgtacataaggcagttctcctgtcccgcctgccaccagttctccactctctccccatatgtaagcccctagtaaaccccatgtctcatttgctgcctctgggtcttttcttcagcctcttgaacctagtgccttccctgctgaggttaataggggtacagcacaacagtgttgtaacacagaaagtgatatttacagggatatctctctcacaatatctcttaggaaaggtaaataaaatgttcacaacttgtaggtgagtaattccttagataagttgtttcttaacttgggaggagtttgggaaggaacctaagcaggctgcagaggctgggcatgggagcttgtcatggctggaagttgaaatggtcaactccaggcagatctcctggggcaaagcagcctccaccaccagtagcccttcctttctgtttctttcatagccccactgctccatctgaagcctgaacccttccagaaaattgatggatagattttttttttcggctatatatagttttagaggttagaactagatataattcagtctagaagatttctccttccccagaaatgattgtttttgtgcagagccccgtcaaaatagtacggagacttagactgagttcactcatcactaacaattaactttataaacattcaacaagtaggacaactattattactgttactcagaacccttcgctctgtatatacagtttgatttaagatgccacatttacatggcattttcaaccttcaaactctagcagattttaaaactaggtggatgaaaatagaatcattctaataaatgtagtgtgtcagatttgaaaaatcatttggtgagcaggatctctgtaaagttatatgggccacgtatacaagacgtaactgaagaaaattaattcaacagagcatgccgtacttgaacgacttagagatttactcgaactgaactaactcaagctggcagaactccgagcagcctggattgtaaagtctgggtgaaaatagatggagtatgcctgactgaacctctgtactgccccacatgctatacaggtgggggattggatggctgttaggtgatcattgcattctcttttggatccctattgagaagaaatgataagagagggaaaggatatggggcaagaacagtctgaaaaagaaaggataaagttctcagactctcttcacactctaagaagaactttctgaaaagcttggattaggtctggcaatggatataataagcaaaggactcttggaatgtgttcttggctcttagccccacctctgactttgagcaaatcagctgatttctctgcctgtaaaataatagtccctctgatattaatacttacctcatgaggttatttagaggatagtgttggtaataatgccttgtgtttacatcattcctttcacagagagctcaaagcactttacatgcattgagagagaagcttctcgtgaagagtaaatagaagtgttcactttttggaaatgaacttaggccataagagcctgaatttaatgcattgcaggaagaaatatggtacatagtgatccagtgggtcaactgaattttttgttccactaagagtcccctcctggctccttgttttgtgaattgaggaatatggtgagtccctacacctggatgggaaatcccacatatgcaattggaatggtctctcacgacacatgcagagattgaagaacagtctggacattttttgataacgttctttgggccttggtagtagctgaaagacacctgagaaatcttagctcagagctacagaatgacactaatggatcccagaaatagaaatgtagatgtggagtgttttatctgtttatttcacctcaattcaaccaatactccttgagtgccttttatatacatgattttgagtgatgtggagaatgaaagagacacaacatgctcaggaaagttaacctggtattagcaaggagaaggagtaggatttacaaatagataagtgcaacggtatgtgggagtgtcagaaaagcatcacagtacttcagcacatctacttgggcaatctcaaacatgtattactcatgtaccaagcagtatgctgttcacagagagatacaatctctgccttagggatccttggggaaaacatgtacaaagagatagttttagcacattctagtaaaggcagtgatcaagggcacctagccttacgtggcaatttagggaaggtaccttggaggatgagacttctcctaaagtcttaagaattgaaaagaacatgggaagggaattccaggctgggagagtagtatgttcatacgccctcagtgtttaaccttctttgaacaaaaaaatggcaaactacagaaagtttggtcttattgtagcctaaattgtacttaggggtacgagtgagaaacagggattaagataaaggacctgttttgctgtcttgtttactgttgaatagtagtatgaagtaggtcctgaaaaactatgtttttgggggaaaaaaaaaaaaaagactgaatgatatgttgggtttaagtccttgcaggcaggctatccaggtaaataaacatggaaggtgatgggaggtaatctgggctggaaatacagatttggaagtcaccccatatcagtggtgtttaaaatcaagagcaaatgaaattgcacaaggagaatatatagaatgaacaaattaccatgggtgaagccttgagtaatacagacatttaagaagcaaacaaaagacaaggaacccatgagggagactggaaaggaaaaaacagagaaataagaaaaaatgagaggagagaattgatacattttcctcaggtgtggcattatggagttcactggtgtctcatcagagaagtttcagtccagtggccagggcagaatgacattgtgtcttgttttaaagtaaatgggtagggtaagaaagttgagaagggttagcacaaacctctctttcaagtcacttgccttagaagagaaggaagggtatggtttctggggtgcaacccaggttcaagaagcaaaaagaaaaaaaaattcatttgataaaagatttaaatgggtttctgggcttagaggaaagagtaaataggcactgagaatttaaagatttaggaagtaaaggggataattaatggagctcggtcctgggagtgctgaaaaggggggccatgtgtggagggcagggcaggatcttgacctggagtaagaatacctcatcctgtcattgaaagaaagtgcacaaggacaggtccaggcatatctaagaaggggaggggaacaatattgggataatgtatgtataattctcttattgaagtagaaaatgatgtcatctgcagagaaggatgtagccttgtttgggctcttgagcaatatgacagtttggtaacattgcttagtaaaataagagcaagctaagcaagaatgagtaggaggttgagccacgttgatggcctatttgagattgaggactgcagatttatatagttgcgtcaatctgaaagctgacttttttttccagctgagctcaacagattggtcacagaaatacagaagtctacgtttgaattgattctaaagatattagtgaaagaatggttgaagtaatgagccgtgctatcccaactgggtaaagcagtgaggccaggaaagaggtcaaggaactatggttttccagagattggagagcagaggtagtaagggcaaaggcacggggagcctggaaggatcagagattgtggtcatcttcacataatggataggaagcagccccactagataattagttgcagggtttgaccttggaaatctgtgaccatggagatgaagaaggtgaggaatttatagtttattggatggcttgtctagatggatactgaagtcactcattgtcacaaagggtatgttaaagattgttgccaagtgccctagtcatgaataagtgttatggagggaccaggatattagcagggggacatcaatgagaaaagataattggataatatgaaattcaacaaatgaggctgttacatcagaggcattagggagtaatggtttagaagcattataaaaaggaataatcagttaggcattggcttaaaatttggataagccatataaacttgttgatatttgagtattttgacatataaaaatagtaatttcatatggttcaacctcatactttgcgtgcattaaatcattcattctcacaactaccttctgaaatgggttatcattttgcagctgagaaagtgaaggcatagaaataataagtaatttgcccaaagtcatctgataagttttggagctcagtttcagacccaggcagtctggctttagaggctgcaatcactctgaatagggaatgcccaccttaccctcactgcccttcaggccttctggtgtgtgaggtggatgagaccaaactcctcttaagcatgtaataactgagataaatgctgtaaaggaaatgaatgtggttcactagtcagttttgaagtctcattctcacatactctgtgcttccccaccctatttgtgttcgctttcactcccaaactacttctacctaattgcagaacactttctctacattttgcctaactgaaacctagcatatccctgctttccttgtagtttactagtagataagtaggaaaatagttctagaccttgcatgtacagggtcacaagagtttaaaaagagcaaggaaaaccattcagtaaatgacaagacattctgtatatgggatatgaactgggctgggagagaggtagagtacttaagagagcgtgctacgatagacctcaaaggactttttaccattctaaagaccttaaacattatactatctgctacagccagccacagaaagattttaagaagcaaaatgttgtgaggatattatagataaatgttggtgtggatgcaattaaagggaaaaagactagaggtgggaagatgggttaggaagctgttgcagtcattcatgtgaaggaatagggcttggcagtgctcctacctgtgtgattgaagaggaggggctgtattcacaagatatttaacagcaaggattggcaggttttggtgtctcttaagagaatatgggggctgggcgtggtggctcacgcctgtaatcccagcactttgggaggccaaggcgggcggatcactaggtcaggagatcgagaccatcctggctaacatggtgaaaccccgtctctactaaaaatacaaaaaataattagccgggcctggtggcagatgcctgtagtcccagctactcgggaggctgaggcaggagaatggcgtgaacccggggcgcggagcttgcagtgagccaagatcgtgccactgcccaccagcctgggtgacagagcccatctcaaaaaaaaaaaaaaaagagaatatgggatgctggaacccataagtgagatcaccacacaaggaaagaagtccatttgaaaggagagatgaggagtcctcttttctacatgttgaatatgagatgtctgtagaatctgggtagaaatactggtatgggactcaggaatgaggtctcacaggagatgcagatgaaaatatgttagtattgcttaacctctctaagcctcacttccaaaattcccacttcctccatcagcttttgtcttgtagccactccctgatctaagttggtaccagagtatagggacagagacctgagtgaactgtggctttagacctgctttcatcaggacctcacactgtggactcacaggagtctgtatggtagggtctaggatacacacggaacctcaaacttctgaaaggagtcctctccctgcaacaccattcccataaaagagaacagagtcggttcctagcttgaatgaatgaatgaataatgacgttggggcctctggatatagatcattctaaaaagcacctatatactcttttggtaggatttggtacaggtaggattatgtaaacctggttgctgacctagatatatgtagtcttgttgggaaacatggattagtcataaaattagcacactgacatggagtatagtcagcaaatggataagatggttaagtatctataatatagtttgactaagcagttaagtgaatcagtacgaatattattgagaggaacctggttctgacagatataaggtagtgatattgcagacatataaaaatatagactgatatgcaaagtgtggggaaagatgtcattcaaaccagtctttttatgggcttaataaatttgataagggaataggaagaaagctagtcatctctttcccttaggttgaaataaacttgacccaatagagtaccctagttttgttcatttgccgaattgacttagatgccagggatttgcatgtggaaaactaatgccatggcaggattactagactgtaaattcattaagaagtctgatgatatcataaaccgtgagaagcctctgtcttgcagcagcatcggaaacgtccccgtccccatttgagtaagtgctggtaatccattttatttctctccattagttattataataataacagattggtgacacggcctcattttctgcctctagtgctgtctgctgctgggcacagctgctcccagtcattctttccagagtaaataacggttcatgtttccatgggctgtcgcgagagctttctgtgcttatgaaatgagcccatgtcaccaccctgttgggaaagattgaaggcatgggcaaagccaaggaactgcatgggaaagccagagctttacccctaccctaagatatgttttttgctcttgaagacatttagattaactgggtgttaatgatgttaacttccataagtgtgaggcaagaaaattccatcacttggcatctgtctgatgcaggcctttggctttggaactttttctttcatgttagatgtaaataatgaactcctttgttgtgagagggtttgttacaaggaagtaaacacatcagcaaagagcatcttttgatcttcacacctttggcaataaaagctgagagcagaaataggccagagaatttgggacagaaaccactaaaagctccccttttatctgttcacaaaattaggtgcagaactataggaacaatggatggaatgacaattattaaaaaagatgaagggcaaaatgaggccacctgaataataaaagccaaggtttagattttatgatctgctttaaaactcagtgaattctctgaaaaactaggagcattatatagaaacatcataaacaaaatgaataaaaattttttttctcttcttgtgatctcattagtggatgttaacaaattttaaatattcatttgagaatacatgttataagaacactgattttctgtgtgtgtatgcaaaattgcaaaaactggtatgttttaatgccttaattatgtgactcttgtctcatgatcattaattcaatcctcttctaaacatcaaaccacatattcatataaaatagaaatctaaaatatgcagttataaatacatatgaaaattcctctgtcttttttttccttattttgaaagtttaagctttattgccaggttttattggtagaaaactaatgttgctttatttcatgaaagttatcaacatcctcccttcagatcttatagaatttatactcacatcctataggtaagtaaatagattgaggaggaaaaccacttctgtaagaagaataataaacacacttcaaacttgatgaaaaataaatggatctgcactcaaaaacctatttaagctcacttttttcccccagtttgggtagctttataatgaaggcagagattgggatgcaggtatcatgttagatgttaaatacctctattcctaggcctggtgtttgttgttggtggtgggtggagggatggttgctctaagttttaggtgttcttgatagacaatatataattgataaataacttttcaaagatcttgcattgttttctgttttatcccactgtttcctgtaacccacagttccaaatagctggctgaattgctgtgtgataaaaggaaatctgagactaagtaccaattccttccaagtttaagaacaagaaggttttctgaatatttttcagaggcagactggggaactatgtttctttttaatggtcttttaatttgaaagttaaactaaatccttctaattgcttgtaggtattggacaatatgagtatttccattggataacatggagaggacaatttatcattgaaggacttgtcgtttttatcttagctgaatagggtgccagtatatacagttcgtgctttcaagcacgggttgatttattatggtttggacctgcagtttttagaagggatcacaacaggatttttctttgtaagtttagtaaagcccatttcttaccttgttgactgtcactatcaggtcaaaaaacttagaaagcaggaataaaaactcattatttgggctgggcgcagtggctcacgcctgtaatcacagcactttgggaggccgaggcaggtggatcacctgaggtcaggagttcaagaccagcctgaccaacatggagaaaccccgtctctactaaaaatacaaaattagccgggtggtggtgtgtgcctgtaatcccagctactcgggaggctgaggcaggagaatcacttgaacccaggaggcggaggttgtgatgagccaaggtcatgccattgcactccagcctgagtaacaagagcgaaactccatctcaaaacaacaacaacaacaacaacaacaaaaactcatgtttggagtggaaaaaacctgttgtttgatgacatgtagttaaaattcatttacttatattcaaataaagataataatttagtccttaggagatgaacatttccatattctctttcctaccccttggcatgggctcttgtgtttgccataccaggtggattcagtccaaactctgtaaacctgggcgtgttatttgatctttttgaatgtgcaaagctagaaaataataccattttcacaagttcattaagacacatttatgacaaaagatcaacagtcattaattacagttaataactctgagtgactgctaatgttccaggaactatactgagcatcttagattatctagattaagcccagtgaagtacctttcacctagcaggcattcaacttccacctgcttctgttcctccccgctccaatctaccagattcctcaggtgaaaggaatttctatttgttcacatattacttcatccttcattcatgcatccattcaacaaatacatactaaactccttctagttcgaggaactgttgtaagtgctgtggatatagcaatgaccaggagagacacagttccaatggtcaaatgttctagtgcaggagactgacaacagacaggcagtgaattcaaggagttcaagaccagcttgaccaacatggtgaaactctgtctctgctaaaaatacaaaaattagctgagtatggtggcgggcgcctgtaatcccagctactcgggaggctgaggcaggagaattgcttgaacccgggaggcagacgttgcagtgagccgaggtcacaccattgcactccagcctgcaaatgagactccgtctcaaaaaaaaaaaaaattgatacttcatgtggaaataagtgctatgaaaaagagaaactagggtaaacaacagaactgagaaacacagaggaagagagcgttctgttttagactggtctaggaaagggacatctcagcaaagtcctgagtatatactcatatcaaggtcattctaatagtgacattcttactcaaattgaaaagtcgtgtatatgttgagttgtagaaggaaagtttagaacaatcaacagcatccattattgcatattttctttgggctagcaagcaaacagtaataaaatgtctctttttgttgttgttgttagagtcacgctctgttgtccaggctggagtgcagtggcaccatcttggctcactgcaacctccgcctcctgggttcaagcgattctcctgcctcagcctcccaagtagctgggactacaggcatgtgccactatgcccagctaatttttgtatttttagtagagacgaggtttcgccatgttttccaggctggtctcgaacttttgacctcaggtggttcgcccgcctcagcctcccaaagtactcataagccaccgcacctggcccagtgtctcttttaatagatataaagcacttagaaggtggaacatagtaagtccatatagtgtatgctgctattagtctacttgaggagagtaaaaagatactgtggcccatatgctacgcgttcctgcttataaccaaataattatatagaattcatacataaagaataaaattggatagggatgtctatttttattggatgttgtaagtaagttattaaactgtgtccaaaagaaattcatagatatcatgaacttagaaacagtaaccccccaagagaattgcagccaaactactactagtaggacccatggtggacctgcatgttacttcagtaactggcagtctagtccagtggtttttctttcaccacattgaagataccactttattttctcgtggcttgcatgatttgcagcaagaagtttgccataatttttatctttgttcctctgcatatgcatcttttttttaaactgtttaccttcaagatttattctttatttttagttttcagtagtttcaatatgataggattttattatcttattttattgttgttacttaccctactcagagttcttcaggtttcttggacctgtggtttgatgtctttgattattttttagaagatgtttgaccattatctcttcaaatatttcttctgttctttcctcctgttcagttattttctctggcttcctaccttgcccccagtctttctaatgagtgcctgatgtaggtccaaggagaagagtctgtgagtgagtttgaactccctgtgtgactgcaccttgcaggaattctatcctcttattctagcctatgatcaccgtttagcaagttcttagatatataggggaatccttcttaactactaatagcacctagtgtctctatgttaggatttgctgctttttcttgtcttttggatagaacagcacgaacattgtcatggagggatgaagcaacctggcatgtactgtacacagttcccttgtaagaggcataaggctggaggaacagacaggcagcacagcctgcaaagaaaggctatatcacagtggagctgatgcctcatcccaggagcagtggggaagccagaaaagagacttagaccaggaaataacattaacagctttccatcttagaaaggttgatctagtagctgaatgaaggacaaattaggagaatagagagatctgaagcagggaaacaaagtaagagtatttctgtggttcagaaaggtatgctgggggcctatgggcaatagaagtggagtcagagttggatagagtagctatgagagatgtcaaggaagatagccaatatacctaaattacttgttttcctgggaatgtaagcaagtaattacctccaaaaagaataaaattattttagtgtctccatgaaataaatttcaacaacaaaaaaattagttgatttttttagtatacaggccctaaagtgtatagtacaaacagtataatatcttaaccaagattatttaaattctaaattttatcagaaaaataagagaatggaatcatttggatggagcatgacactgctgagatcaggactactgggtcagttccttcataaactagttaacttactttgtctgatggcctaaacctaggcagtcatttacaagtatggatccaataagagaaatctgttaccattactaggaagccagttcaaagcacataatatgcatatatacaccattaacctaaaagaaaaaattgcaggaaaaatagaaacaggccaaaatttccatgagcaaattattatgccagatggtcctctttaagattaatattctgttttgaagttcctcataattccacctaaagtcattctttacataaaacaagcaatgaacgtttcaaaagaaaacatttttaaagctctacctctggaaagtattataaataaaattttaatagtaaagcatttagaatttatagactaagagtagtatataaaaataaaatgtcatcttcaggaattccctcatggaagcaaaaaaattcaaatccaaccatctccaaaaaaccatttaagttttaaaaaaatgaatccagcaatcccactactggatatgtatccaagggaaaagaaatcaatatgccaaagagacatctacactgccaggcttattgcagcactattcacaatagccaaaatatggaatcaacctaagtgttcatcaatagatgaatggataaagaaaatgtggtatatctacacaatggaatactagtcagccataaaaaaagaatgaaatcttgtcatttgaggccacatggatgagcctggagggcatattgttaagtgaaataagccaggcacagaaggatgaacacaccacatattctcattcatatgtggaagctaaaaaagtcgatctcatagaagtagggagtagaggctgggcaccagggctctcccctgtaatcccaggactttgggtgtccaaggtgggtgaatcacatgaggccaggagatcaataccagcctggctaacatggcaaaaccccgcctcttctaaaaatagaaaaattaaccaggcaggactgtaatcctagctacttgggtggctgaggcacgagagtcacttgaacccaggaggcggaggctgcagtgagctgagattacaccactgcactccagcctgggcaacagagcgagactcttgtttacaaaaaaaaaagaagcagaagtagggagtagaacagtgattactggaggctgggaggaaagggaggtggatatggagaggttggttaacagatacaaaattacggctagataaaaggaataagttctagtgtctgtggcactgtagggcgactagagggtgtagttaacaatttactgtatattttcaaatagctagaagacaggatttctaacttccccaacacaaagaaatgataaatgtttgaggtgattaccctgatttgatcattacacactgtatacctatatcagaatatcacactgtaccccataaatatatacaattacctatcagttttaaataaataaattttcaaaaaccacaatatttttttgaatgagactctacctaaaattttattatgttctctctttatggccttcttttgggaaacactaaaaagataaaaagcttgtctgtatatacggctcagagttaagagatgttaaccaagcatatcacagtagaatgattctaaagatgttatatcatgtccacttttctaatggagtaatttctatgtgggaactaaattttgaagatgatgaaccagcattggagtcaggttgttcataggtagaaatggtttatttttctttcccagatttttttaaagacttgttctaatgagaaacaggataaaactccttaatgaaaattccactagaaaatggttttttaaagaataaaatgagacctgttattacatgagtgttaagtattacctctatatgtcaatacaaaaatcattaattaaaataccattagctttttatttttacaccaacatttatggaataatgataatattcatggcattgctctagtattgtaaggatataaagaggaatgggacagggtccctcctagtccttaaagagggcacaatttagttgggagacaagatgagttcacatataggtataatatgaagttgaattttgtgtattgtcttaaaagagagagagcgggacaaagtgctgtgaagggtgaggtaggagaactaatttgtggttaaggacattaagaacattattttgaaggaggtggtatgtaagttgagctttaaaagatggacagaaattattaaagcagcactggggggaaagaattctaagcaaagattacttagaagctggaaattagagggtgtgccttagaaatgatgagaagcctaattcaggcagtacagtacggactatatagtgagacatgcagtagtaccttagagctctatttggagtagtttattggacactcggagcaagtttagctaaatggttaagagtctaggagctggtgccaaattggcctgggtttgagacctggatctactaatcttacctctgtgactttggacaagttacttaacctctctgtatctcagtttgctcacccgtaatctctgaagtcttgcattggatgttttgaaattcagaatttttcagtttggggaaaggaatatggtatagtacatcagatatgttaggtaactgccccatcaaggtctgaggcagttcctcataaccagcacatttttatttccacagaaaccatctggtagtttacaataagtggaataaaaatgatacacacttttttatacattcagttcaggttttatccaaatgagtttattacaaacttaagaaaaatttaaaaattactggctttcagcagtttttagatttcagaattgtgaataaggaattgagggcttatggtagtatcatttttataagattgttttgagaatcaaatgggacagcgtattggcagagcttgcaccctgcctagcacttggtaagttctcactgttatccgttctgcattattattagttacaggtgtgacttgtttaaaatgagccagagagagagtgagtgacatgttctagctattcagaggcagaacaggacaaggagccttctaggccagtgctgcttcctttaacattatgctaggtttgaatcgggtacttgaaacccttcaatactggctatgtacccatgtttgctggacaattgggacccatttaaccaaatgaggcataatgaagatgtgagctttggtagaatgagaatgaagagacaattggtcttgctagtgaaatacaggggtgagggaagaggcaaaggttttagaaacaaaggacctctcacatttgtgtgggattacatactcacactctgtccgagcattgtgccactgagcctcacaaacaccctgtgctgggatgtggtgccaatagttctttgacacctgacttttgttattttataccttccaacttttaactgtggtgcttccactaccccaatgctaaacttgtccctggcctcctggcaaactcctacttaatcctcaggactaagctctgatgtcacatcttaagcgaagccttcctgaaatgacttaggaagagtcaggccctccacccatctggcttctgtgggatccatgtgtgtcacagcatccaacactttgctatagttccttatttgcatgtcctgtttctctggccactcttattagtattcctagcactcacaatgatacatgataaatgatacaatgatacatgataaatgtttgaggtgattaccctgatttgatcatcacacagtgtatatctatatacctatatactaaatatggtatttaatgcagatttaatgtatgtatgaatccccgttttgcaagtggaaaattgacagtttcaataacttgtccaacattgtgccttcagcaccatttgaaaaaaattggttggaattagtgtttaaaccaggtctgcctgattccaaattgcgtgctattttctcatctttacccaaaagaggaagaaatatgtataggtgtttattcacacatgcacatgcataaatattagggaaggttcgtgagacaacattgcagagtcaagccacggccaggcatggtggctcacacctgtaatcccagcaaggcgggaggatcgcttgaggccaggaattcacgaccagcctggataacatagtgagatcctgcctctacaaaaaattaaacaacaaataaaagccaagcataatcacttttctattttatttttctgataaacataatatgctcttttagttgtttataaatatgcataaatagaagtttatacttttgtgacggttgttagtcttggttttgtataatgttataattagtttaaaaaactaaaacaatataagtgctatatatttcggtatatgtattttagtatatgtttttttaatagtattgtctatatgcatgcatttcttatctctttgtacacatctttttttatgcctgtcatgcttatacattttgcatccaccaatttaatctggggctgtgtatttatgaatgaagagcaaactttcattcaccattaggtaattttttacttttttttttttgagacagggtctcactctttcaaccaggctagcatgtagtggcgcattcatggctcaaacccatcgtcagcctcctgggctcaagtgatcctcccacctcagcctcctgaatggctgggactacaggcacatgccaccacgcccagctaatttttttatttttttatagaataagagtctctcactctgttgcccaggctggtctttcacccctgggctcaagcattctgcctacctcagcgtcccaaagtgctgggattacaggcatgagccactatgcctggcccattcagctaacttttttaaagtatttttgaatcactgaagtgcttaatcatggaagtaaccagaccaccattcatttgcatgattctgttaatgccatatatagtatttcatagaatgatccttcctcatttttcaaaaatgtgcttataaaatttgtgatgacaattgaacagcccaaccctatgaaatggtaatttatgcagcaataaaaaataaataaattcatataatgtaggcttgcagctgaagacagctgtgttaaacatgttttttagtctgttacatcaaagtaatacatacagtgctgtacgaaaatgtgtagggcgaatgtctttgaggtgcccacatataagctgtgcttttgtacccactgtgtgaatatgagggaagtcattgttctgtacccatcaggaataacacatgcaatgatgaaaatattaaaaatgcctttctttcagatggtgcagtctttttacagctattatctcacttgccttaagtgccatttgaaaaaaaatttctcagggatattgttatctaacttctttgaattactgaagtagccaagaaatctctctagcactgatataaagaaatggaagtaccagccgggcacagtgactcatgcctgtaatcctaacactttgggaggccaaggcaggcggatcacctgaggtcaggagttcaagaccagcctggccaacatggtgaaaccctgtctctacttaaaaaataaataaataaatatatatatatatatatatatatatatatgtatgtatgtatgtatatatatgtatgtatatatatatatgtgtgtatatatatatatatatatatatatatatatatatatatatatatgtatatatatacacacacaaaaagaaaaaaattagccaggtgtggtggcaggtacctgtaatcccagctacttgggaggttgaggcaagataattgcttgaaccggggaggcggaggttgccatgagctgagatggtgccactgcactccagcctgggtgactgagcaagactcagtctcaaaaaaaaaaaaaagaaatgagaagtaccacattatttacctagaatctctgtttccaactgttcagaccccaatattccatgtaactctacctgtagctagcaagaaaagtaaaatcagaggatgaaagcaaaggagaatggaccatctgatgaaataaacttataatgtagaataacttgccagaagaagtaacagcacagatttggtcacaaaacagcctagaggaaggccaagagaggaaaatgtcctataccacaagatataaatcagttacctaacagatttttgttgttttgttttattggttaatctcctaacttctgtgatatgttaattagcatgaaaaaggatgtatatgtatgtgtgtttgtgtgtgtgtgtgtgttcagctacaaaggtaaaagaatatcaggtgctcaggtatgaaataattgatccatagttctggaagtccatcacaaattggcttaagcagaatttttaaaaagtgaaattggaatgtgattgtttgagagccaaaactgcattctttgagtataattttactagtagccattcatgtatttattatgtagagtgtcctgtcaaacaaaatgaaaggctatattttgtcttctccacatgtaatctagagccaagaatgaaaaccacataatatatttttaggattaaaccatttattactgatagataatgacagagcagaaacaggaggcaccagttagtctgcattagctcatgagcctggataacttttttgtgaactctaaagatttgtgaaattctatcatttgcattaactttctgataaatttctgatgtggtcagtggtcctctagcccctggtcactgaaactcattctgcacactgccaagaggtatctacccttagaagatctttgcccaaaatttcccccttcaagtgctttttagaaagaatgagcacctttgccaaatctaccaagcctcctctctggccaattactttggctactgtgggggagggaatcctagcatgtaggaagatgtgtagtaagaatagaaagatctatgttttactcagaattctgcctggttgagaaggtaagataagtatatgataaaatcaaggatcatattcagctaatgtttattgagtacattctttgttgccaaacatcagccccaaagcacagtatatagatattaacaaacacaggattaggttaataaggaacttggacaactggaattcccaggttaaataaactgaggatattgctcttagaagaaaagatttagtggaaatgagataactcgtgttaaaaataaatacttaaaggggttgccgtgaggaaggtataaggggcagggtaccaggtatatatggttagaagttgcatattctgcttatccttttttaatttaaaacacagactactagaaataaagttcaaaagttaattggagtaaagagaagattgaacaaaaaatcatcctagggggtcaaaggttgttttaaaaggttgagaaaactgcaattggttctctaaaattagtctcaagaaagtgatctagggcccatcatggtggctcacgcctgtaattccaacactttggtaggctgaggtgggcagattgcatgagcccaggagttcaagaccagcccgaacaacatggcgaaacctcatctctacaacaaatagaaaaattagctgggcatggtggtgcacgcctgtggtactggggaggttgaggtgggaggatagcttgagccaagatcataccactatacttcagcctgggtgacagcaagaccctgtctcaaaaaaacaaggtgagcttgccaattcatacttttaaaattaaagtctgatatttctcttcaatcttgtgaatttcttttataatcatgagaaaagcttttttttttttgagatagagtctcgctctgttgcccaggctggagtgcaatggcatgatctcggctcactgcaacctccgtctcctgggttcaagcaattctcctgcctcagcctcctgagtaaatgggattacaggcacctgctaccatgcccagctggtttttgtatttttactagagatggggtttccccatgttggtcaggctggtctcgaactcctgacctcaggtgatccacccacctcggcctcccaaagtactgggattacaggcgtgagccaccgcaccgggcctgagaaaagctttttaaagttctgttggatatattcataaaacacattgggggttaaagtcagtatgaccacagaacacatttgtaccacaatactttgatactaataggacttaatgagatacagtttgcacgtggacccaagtcaacagcaagaagtttattcacagataaattaatgtctataagatattaaaatttatttcacttgtgttttcattgttataagaggaaaaaagatagaaaatctaaattgtttttattttaataagaaccagatatctcaaatatgttcaaattataagatgtaaagatagcttacatcaatagaatggttggtagatgttgctcatgcatcaatctgtaaattgaatgggatatgtcccaggaacaggtgttttttcatgaagcttgtggcattagatatgccctccactccattgccataaagacatatcattgtaaaataaagagaatagtatgtgtgcttcagggggttttgcatattttttaaataaagaaaaagtatatcactggcatacattatttttaacaacacagttttagacatactagtgacggttagtttttctgaaagttgatagtgaaagaaatagacgagaacaggagttacagggcttatatgaggttggtaggtatatttttatttttttaatggggagaattaagatacttgtttgtcaaagagaattaccaactgcacatggagagaagaaattgaagaaattgatgaagattaaatgaagtggtgatgggtgtgggcctaagaactcaagtagaaggaggagaatggttcttcctctagtctagtggccctaagcgggggattcttttgccccacccccaggggatggtaggaagtattatggcatctagtgagtagaagccagggtttctgctaaatgtctgcagtacagaggacaaccctccacagcaaagagttattcagaccaaaatgtctatagtgccaaggtggagaaaccctgatctagttaggaggacaagaacatattaggagagtatacaaagaaatatttaggccaggcacagtggctcatgcctataatcctagccctttgggaggctgaggtaggaggactgcttgagcccaggagttcgagaccagcctgggcaacatagtgacaccccatcactacaaaaaaatacaaaaattagccaaccgtggtggcatgcacctgtagttccacctactcaggaggctgaggcaggaggatcacttaagcccaggaggttgaggcttcagtgagccaaggccatgccatgcactccagcctgggggacagagtaagaccctgtctcttaaggggaaaaaaaaaaggccaggcacagtggctcactcctgtaatcccagcattttgggaggctgaagtgggtggatcatttgaggtcaggagttcaagaccagcttgggcaagatggtgaaaccttgcctctactaaaaatacaaaaattaacggggtgtggtggcatacacctgttatctcagctactcgggaggctgagacaggagactctcttgaacccgggaggcagaggttgcagtgagccaagattgtgccactgcactccagcctgggtgacagagcgagattctgtctcaaaaaaaaaaaaaaaaaagaaagaaagaaaaaatatttaagtgcaagagattatttaaactaagggagtttgaaccctctggccttaatcttattaaaatagaaagccacatgtctgacaagactaacaattctgttattaacatgacccaaagtcagaattagtttagcacagtcccaagacctcagttattttcttcacaggtgcatgtaatgaaacttttttgaaattccattttaaattgcatgcatatgtccaatgagcaagtcagcaaaaagaaatgtttttattaacttaaaaaataacattctagcagtaaacatttcattaacttgatctggcaaacaataatgcacatagttctagaacagagctgccagtctctcatcctgttggattcttgaaagatgttgaggatactgttcttccaggccatcattctgtttcttaagaatagctcttttttctctaatcaaatgaaagtaaaaaagaagctggtacaccaaaatgtaaggttaagctgtaatttcattgcttgtcaatacatacttcttaagaatcttctttttatattcttcagtttcaataacttttttttctataagtgaacaaaagctaaaagaattgtgggatcttttatctttattttaatccaaccatatattctttttagaaagtctgaaatttggccgggcgcagtgcctcacgcctgtaatcccagcactttgggaggcctaggcaggcaaatcacgaggttgggagatggagaccatcctggttagcatgacaaaaccccacctctactaaaaatccaaaaaaaaaaaaaaaaaaaaaattagccaggcatggtggcatgtgcctgtagtcccagctactcagaggctgagacaggagaatcgcttgaatgtgggaggcggaggttgcagtgagccgagatcatgccactgcactccagcctgggcgacagagcgagactccatctcaaaaaaaaaaaaaaaaaaagaaagaaaaggaaaaaaaaagaaagtctgaaatatatcttcaattctgtaggtttctcttataagaaaaactttgttttaaagaccatttccaaagtccagttgtattttcttggtttgattctgactggtagttagatgatgcaaacaaaaaagaaattaaccctttctatttgtttcctttaaacataaaaaaagcattgtctggattgcctctataacttttacagaaacatagtataataacacttaaacttccaccattgacccattgttcttgggctgttctttcattggtaatttttattccaaatctggcaggtgccttcattctcctggcttctgccttggtttctattaaagcttctttcagcactcggagtaattgggaactttctgttttcaaatttctgtacggaattatcagaagtgtagtgtgactgtgtctatacctttagagcaggtacattttttatggacttcaaaggaaaaattaggaattatttttctcaacaaattcttccatctcataaacttacttagcatttgttttgtgattcactcacagttcatagggtgctttcatatacattatcttgtttggacctagcaacaactgtatgacatgggtattataattttcttggagataaattaaatgtaagtttagtgaggcttatgactccaaagctcacaaagccaacctctgttctgattcctgctttatatgctctggtctgagttctgctctgctttctcaggggctcttgactgcatgtctaggattctaggtactaaatgtagaggtgggggtgaggcaagagtgaggaaacaggaaaatcccccagacaagaagactatcacttcccattctagtatctaataacccaattactgtgtcccccacattttctggagacccaaaactacagcactctggatgttttcctcagttgactccaacccttgactccatttccttattggagctgtgacattgttatcttagtcctcctgttcctgcagtttcactgctcttgcaagctactctgactttattttgaaatattttcagagagtggaagtattacattcaaagcaattttttcaaaatactcaatttagtatcttcctctatatatatatatatatatattttttttcttttttttgcagaaaaatacctaaggaacaaagtaaggtaatcctatttagtatgctaatatgttatcaacatgttaatattaaaagttagatattgatttgatagaaaggaaaatggaaataaatttttacttactcagatcagtttcataaaatctcattactgtatgtagtcaatgttaagatttcaagtggattttaaaactggagtagttatttccttagttccaagacacctggtacgtgcttaagagtgcaagagagagttatacccacccaaagcaataatgccagtggtttatttctgactataatattaagaagtatgagtctttaaatcccataaaatgactatttttgcaattctctgtttgccgctttgtgtttgtttgagaaagagaaatatattgaacttatatttacccagcagctattgtatgccagatactgcctatgctctagaaataaaataatgaacaaaacagaaaggctagtcctaacagaattctcactgggtggtagagagggtagtcaagagaggagagagaggcaaagatagacagaaagagatagacattctgtttctatatcagggcttgaaccagaagccacagattgccaactgaaccatggcacccagtcatcagagaacttaatattgatccgttcaatctctctattcacagcttacattgagagccctatgcccttaggcacttgctgagtgctgaggacataacaaagtgaacactaaatgttcagcccccagccctaattacaccttctctcaacttaaagtcaaactaacaaatgtgtattaaatgaatatctattatgtgttccagtggtggttttcagtcatggccacaattagaattactggagagcctctaaataataccaattcttgtgcttcacttaaaaccaattaaatcagaatcttagagatgatgtcctggcatcagtatcattccaaagcctcctggtataattctgatatgcagccagagttgaaaacccatttcctatcaagtgcccacgggaggaaaaaaagaaatataagaaaaaaaatttacctatatttgtaataaaaaaaaatacctttctggaattccataaagaaggtggaagaagcaaacatttaatttcccttcatattttctccaacagataaatatttgttgactcccatctatgcagagagcaaatgaaaaaagcataaagtctgccccttccctcaagtagcttaaactttggttggaaataaaagtctctgccttttgggaattaaataaaaatacaggtgctccagaaatatccacaaatgacaaagatgcccataatctggtccatgagttcccgtaaggacaaatgtcactgggggtcagtcctgacataagaccaaaaaaattcttcccatctccccccataatggaatataacaggaaatatgcccattctcattcgatttgcagtagaaaattcccactaatttacaaataagcagcctattcttctttaaggagagaatgttctcattagaaatgtatgaccatttcaaatggctgatctacctgtttgtgaagtgtgaggcctacctgcaggggcacacacccttccaaaagttttaaaacactcagtgaatgtcgctggtgaggttttaggagtaataatagtaattgttccaaggtatattcctattgttgaaaatatatgaagtgattttataattttttaatttaattgattttaaatctatcttttttatgtttatatatttaggaggtacaaatgcacatttcttacatgcatatattgcatcatggtcaagtctgggcttttagtgtacccatcacccaaatcacagacattgtacccaataggtaatttttcaaccctcacccccctgccaccttcccaccttttgtattctccagtgtctgttattctactctgtatgtccatgtatatccattgtgtagctcccacttataggtgagaacatgctgtatttgactgttgctgcgttatttcagtgaggataatggcctccagttccatctatgttgctgcaaaaagacatgattttattctttttctaaagccagtaaatagtattccatggtgtgtgtatatatatatatgtgtgtgtgtgtgtgtgtgtatgtgtatatatatacacacatatatgtatatatgtgtgtatatatatacatatataggtatatatacacacatatgtatgtgtatatatgtgtatatatgtgtgtatatatacacacatatatgtgtatatatacgtatatatatgtgtgtgtgtatatatatatatacgtgtatatatatataccactctttctttatatagtcctccattaatggacacttaggttaattctgtatctttgctattgtgcattgtgctgtgataaaaatacaagtgcagctatctttttgatataatgatttctttccctttggatatatatcccagtagtgaaattgctgaatcaaatggtagttctatttttagctatttgagaaacctccacactgttttgcataaaggttgtactaatttacattcccatcaacagtatataagtgtttccttttctctacatccttgccaacatctgttgttttttgactctttaataatagccattctgactgatataagggagtatcttattatggttttaatttgcagttctctggtaattagtaatgttgagaattttttcatgtttgttggctgcttgtatgtcttcttttgaaaaatgtccatttttttgcctacttttaaatggggttatttggtttttttcttgttgagttgtttgagttccttgtagattctggttattagccctttgtcagatgcatagttgcaaatattttttcccattctatagatggtctttttgccctgttgattatttcttttggtatacacaagctttttagtttaattaagtccaatttgtctagtttttttttggttgcatttgcttttgaggacttggtcataaattctttgcctaggccaatgtctacagtagtttttcttaggttttgttctaaggtttttatggtttcagatcttacatttagatctttaatccatcttgggttaatttttgtatgtggtaagaagtatgaacccagtttcattcttttgcatgtgactatccaattttcccagcaccatttattgaacaggttgtcatttcctaatgtatatttttgttgaccttgtcaaagatcacttggttgtaggtatgcggccgtatttctgggttctctcttctgttccattgatctgtgtaactgttgttataccagtgccatgttattttggttgctatagtcttgtataatttgagtaaggtaatgtgatacctccagctttgttctttttgcttaggatttctttggctatttgagctttttttgggtttcatatgagttttaggattgttttttctactttggtgaaaaatgacattggtgatctgatagagattacattgaatattattaaaattacattttaataatattgattcttcaatctatgagcatggatgttttttcatttgtttatgtcatctacaacttctttcagttttggagcttggaacttcactagttcatttgtcaaatctaagagttttttggtggagtcttcagggttttctagatataagatcatatcagcagctaacaggaaaaatttgtcttcctcttttccaatttgaatgcctcttatttctttctcttacctgactgctctgatgaagactttgatactgtgttgaataggggtggtaaaagtgggcatccttgtcttgttccagttcttagagggaatgcttttaacttttccccattaagtatgatattgggtgtgggtttgtcatatatggtctttattatgttaatgtgtgttccttctatgcctagtttgttgaggatttttatcataaaaggatgctgaattttatcaaatgctttttctgtgtatattgagataatacagtttttgtccttaattctgttgatgtgacatatcatgtttattgatttacatgtgttgaaccatccttgcatccctgggataaatcgtacttgatcatgatatattatctttctgatgtactggttgattttatttactagtattttgttgatgatttttgtgtctatgttaatcagggatattggtttatagttttcagtgtgtgtccttgtctgattttggcatcagggtgatactggcctcatagaataagttagggagaattccttccatcttgattttttggacagtttcaggagtattggattttgttctttgtgtatttggtagaattcagctgtgaatccatttgatcttgtgctttttgttgttgttgtttctgggagattttttattactgattcaatcttgctactcattattggtctgttcaggagtactatttcttcctggctcagtctcagtaggttttgtgtttccagcattcagatcagaaaacaaagattactagacctaaagaaagagatagatggcaatacaataatagtaggggactttattgtcccactcacagcactagacagatcatcaagtcagaaaagtaacaaagaaatattggacttaaattggactttaaaccaaatggacttaacagacatttacaacaacattcttaccagtaactacagaacatatattttcatcagcaaatagaaaattctctgaggtcgatcacatgttaggccacaaaacaagtcttagcaaatttttaaaaatcaaaatcatatcaaatatcttctcagaacacaatggaaaaaggctagaaatcaatacaagaggaactttggaacctatacaaatacatggaaattaaacagcatgttcctgaacaatcactgggtgtattagtccattttcacactgctgataaagacatacctgagactggaaagaaaaagagtgcactcccacgtggctggggaggcctcagaatcatggtgggaggcaaaaggcacttcttacatgggggtggcaagagaaaatgaggaagatgcaaaagcagaaactcctgataaaaccatcagatctcatgagacttattcactaccacgagaacagtatgggagaaactgccttcatgattcaaattatctcccaccgggtccctcccacaacacatgggaattatgggagtacaattcaagttgagatttgggtggggacacagccaaaccctatcattccacccctggcccctccaaatctcatgtcctcacatttcaaaaccaatcatgccttcccaacagcacccaaagtcttaactcatttcagcattaacccaaaacgcgcagtccaaagtctcatctgagacaaggcaagtcccttccacctatgagccagtaaaatcaaaagcaagctagttacttcctagatacaatgtgggtacaggtattgggtaaatacagctgttccaaatggaagaaattggccaaaacaaaggggctacggggcccatgcaagtctgaaattcagtggggcagtcaaattttaaagctccaaaatgatctcctttatccccaggtctcacatccaggtcacactgatgtaagaggtgggttcccatggtcttaggcagctcagcccctgtggctttgcagggtacagcctccctcccagctgctttcattggctggccttgagtatctgctgcttttccaggagcatggtgcaagctgttggtggatcttccattctggggtctggaggatggtggccctcttctcacagctccactaggcagtgcccaagtagggactctgagggcttcagagcacatttgccttccacactgccctagcagaggttctctatgagcgcccttcccctgcagcaaacttctgcctgggcatccaggcgtttccatacatcttctgacatctaggcagaggttcccaaaccccaatccttgacttctgtgcactcacaggttcaacaccacgtggaagctgccaaggcttgggtcttgtaccctctgaagccacagctcaaggtctgcgttggcccctttcagcaatggccagagcagctgggacacagggcaccaagtccctgggctgcacacagcatggggatcctgggcccagcccaggaaaccattttctcgtaggcctctgggctgatgactggaggggcttgtgtgaagacctctgacatgccctggagacattttccccattgtcttggtgattaacattcggctccttgttacttatgtaaatttctgcagctggcttgaattccgcctcagaaaatgggtttttcttttctatcacattgttaggctgcaaattttccaaaattttatgctctgcttcccttacaaaactgaatgcctataacagcacccaggtcacctcttgaatgctttgctgcttagaaatttcttccaccagataccctaaatcatctctctcaagttcaaagtttcacaaatctctagggcaggggcaaaatgctgccaatctctttgctaaaacataacaagagtcacctttgctccagttcccaacaagttcctcatttccatctgagaccacctcagcctggaccttattgtccatatcactgccaggccttggtcaaagccattcagcaagtctctaggaagttccaactttcccacattttcctgtcttcttctgagccctccaaactgttccaacctctgccttttacccagttccaaagccacttccacattttcgggtatcttttcagcaatgccccactccaccagtaccaattgactgtattagtcagttttcatgctgctgataaagacatacccaagactgggaagaaaaagaggtttaattggacttacagttccacatgtctggggagtcctcagaatcatagtgggaggcaaaaggcgcttcttacatgggggtggcaagagaaaatgaggaagatgcaaaagcggaaactcctgataaaaccatcagatctcgtgagacttactcactaccatgagaacagtatggggaaaaccggccccatgattcaaattatctcccaccgagtccctcccacaacacatgggaattatgggagtacaattcaagatgagatttgggtggggacacagccaaaccatatcactgggtcaatgaagaaattataatggaaatttaaaattttttcgaaacaaatgaaaatgaaaacacaacatgccttaacctatggtatacagcacaagcagtgctaaatggaaagtttatagcattaaatgcgtacatcaataaaatatctgaaattaacaacctaacatcacaaactaaacccaaagttagcagaagaaaagaaataacaaagatcagagcagaactaaatggagtagaaacaagaaaaaccatacaaaggatggacaaaatgaaaagttggttctttgaaaggataaacaaaatggataaactgcttgctagactaaccaagaagaaggtccaaataaaaatcagaaatgataaaaggaggcattttttacaactgataccaagaaatataaaagatcaccagagactattaggaacaactatgtgctcacaaactagaaaacctagaggaaatggctgtatgctatctttttaatcctcacaagtgtattattgggaaaatgagtcacatgtcaccattaagtgacaaatccagattttgaggctaagtcttccaagtccattgttctttctgataccccagtggttctcaatcttggctacgcattagaatacgtaggaagctttttcaattttgccagagcctgactcaccagtaatattcacaatagatggtaggggcagggtgggaaggatagcagagaaaccaacaaaagtgcttccagaaaaagtaaaaagaatatttcagtgatccttactgtcacttcctctgaagtgaataatagagcagatttattagtagtttaaaactttgtacacagagctatgaaaataaagaatatttatgaaaagataaaataagaatagcatgaggtaatagagttttgatttccctcaaataccaaatatctggcaatttaacacataagtcatgctcttattacacaaaccttaataaaatgtaaactaaagtataatgcattttgaagataatctgctttacaaatgtaggcttaggatttctacatcaagaatcaagatcaagttgaataaaattattcagaagagtcatttcaggttcctgctagagcatagagctaaaaccagttaactggtgtggaaaacttgtggaaacacaagttaactagtgtttagtttaacttgtgagttaaaaccagttaactggtgcggaaattcagaatcatagtgtactactgaaagagtttctaatctcagcaagatctgttaccatctgaaaagttattaatggcaaaaactgcaattacttttgcaccaacctaatacttagttctataaattagtagctatttgtaaaggataaatctatcctagatatccctaatttagatctgaaaatgtctttcttggaatgttttctaactacagggttagaaacatctttaagtagagtgagtttaaatgtttggtgtagcaacccatcttgcatgtgtttaaatgtttgtataccaacacattctttgagtggggtaaactatatatacgtactcaaagaatgtacatttttgagattagatttttaccaagcacaatttggtaaagggaagtagggaagtaggacttgtgggttgtaccacttttgcaggagaaaaatgcaggtattttggagctaattaaagaaagacaaaactcaaaacttagtctttccagcacccatgctggagtgcagtggtgcgatctcggctcactgcaagctccgcctcccgggttcacgcgattctcccgcctcagcctccccagtagctgggactacaagcacatgccaccatgccccagccaattttttgtttttgtatttttagtagagaccgggtttcaccgtattagccaggatggtctcgatctcctgacctcgtgatccgcccgccttagcctcccaaagtaatgggattacaggcgtgagccaccgcgcccggccatggttcttaaactctaacctaatcttttcccccaactagaaactttcagtagttctccactatctttggcataaaattcaagcacacacccagagaaaacctccaccacaagatttttggtttattctttaatacttagctttgacgttgctactctgtgaagccttccgtgcctcccataggcacttgtactatgtacctatatccgtcatatatatctcagttactgattcaatttacagttgttgaatgccagttttatgccatgaattgtatttagtgttgaagatactgagtaaagcagcctttattttttaatgatctctaggtgaggaagcatatttaagcaaattttagaaagtgtgataagctctcactgtagcaaggaggaaaaagaggggcactgtctcatagcacatatcacattcttttgtgatcattactgtgtttctctcccactggaatggaaggcgtgtatattccctgcatcagagtcataagtatagagttggtgtgcaatagtagttgtattttggatggatggatgggtgggtgagtggttgggaggaaattgcaacaactgcctaaaattgtttagtagattatcgacagactttatttagagttggataagggaggtgcatgaatatgggaacatatatatccttacactgtataagctaaatccttgccttgggaacttctccttgtggttcagtgagtcttgaatctgttagagaggatctcgggatataggcttttcagtcagcgctttgctaaacacatcaaagaagtctgtcacttgatggttcattgctttatgatttgccagaagttcaggcaaaa

SEQ ID NO: 372 - DNA, 376559 bp, Homo sapiens
  source 1..376559: mol_type = genomic DNA
ttactcagtaaattctttcagataaaatgataaatggaatttgaagtctgatgtttactctgattaggtgggaaatgcaccataaaagttagaagtcattgttttattttatctgggtataaatagtataatttatttaacttgttgacttgcctgtcatcctcagattttgttaatcttattgaagcctatttgtatagttggaatttattctaagttttattggcttctttgtaatacatgaggaaccccaaatttcctatttatgccattgagacagttgttatttctggatatggtgtttaggattgtattcaaacagaactcttatcaaaacaggtcaatatggtgtgtatgatctgtgtaacataggagtcctgaagtttgtgttctctttgatggtaaatgttcattttcaatttaaaagtttaaccacagttaagaccacgctgctagcaatgcaatatgagacagtgtctttccagaggagtaatcccttaaaaaccaaccaatcaaatgcagagatatgccccatccagctttgctaaatagaagcaaatagctcactttattgtacaaagactcaagaggaagacttagaagcccaccccctcccccattaaagagaaagtacagaaacaaattagaatcgaaaaaatcatggcctgattactaaatcaaaacgttaaatgtgacagttgtttttagaagcatcttacatttatacattttgatgacttttgtattaatgttagaaaattgaaagaaggcttcactggatgtcagtcgttacagaaattgaaatatccaaaagtatatgtataaccaattgagtaatttccgctttccttacacacttgaaataaattttcttttgcttttacaaatagatctatatgtaagaaaattttcatatgattttgcttttttattattaaaaaaggaatatagtaaagccaaagctgagctgtatttgccccacacaacatgaccaaatataaaaaaaaccactgctcttacaaatatcttattttacaaagttgttttttaaattacattttattgtatattataatagtaaataagtgttctaagtggcactgcatttcagaaaatatagaaagaaatcccatatcaaggaatcttggctgaattttgaaacggagttgggaacaggtaagagttcctatctactgagtaattctacaacaggaattgtgtttgaaagatgtagagtctctaacctctgaaactaggtttgagtcacactgagaagaataaatgagatacaattcaaagtttaaccccctagagagatagatggcccaggaaggaaagatcttcccgccttccagaatatcctccatcaagaaccattccaaataaatgagcagcctattttgttctcaaagacatgaacaatgagtgtccttaggctcttttgaaatgtgtaggagagtactgttttacaaataaccatatcgttactattgccattttattaggttggtgcaaaagtaattaccattttttttaaaaaaggcaaaaccacaattacttttgcaccaatagcacatttgcccttgtttggtctctaaagatggagaccctttggttagcatcctttttatgagtcaagctaatatacccacagctcaactttttgttcttgagcttgaatcacatcactggcaatcggccgtagtactctcttacctacatcatggttctgctgcttggaccccaaagacaatgacatggaaaaactccagcttaattatgttcttttttgtttgtatatgtaaatagtttttaggaatgtagattattattttgaaatctgtggtaacaaatgtgaaaaccactacattttatttattttcattgaatagcaaataatgttgaagcctgggatctaaaaagttaaatattattttattttgcttaataaagtattggataatttagaaaaagaatttttttttaatgattggatagttaccttattaatggattggtcagggagaaaaagccctgttggatgaaaactgtcatatatgtgacttttaaagtgaaattaataagccaggcatggtgatgttcccctgtaggcccagctacttgggaggctgaagtgaaaggatcacttgagcccaagagttcaagaacagctcggacaacatagcaagacctgtttctctaaaaacaaaaaacagtaaaaatcttaaaaaccgcttaaagatggttggtttcttttaaaaaggaaaaaaaggctcaggtgcagtggctcacgcctgtaatcccaacactttgggaagctgcaggcagatagcttgagctcaggagttcgagaccagcctgggcaacatggtgaaaccccatctttaccaaaaatgaaaaaaaaaaaaaaaaattagcctggcatggtggcgtgcacctgtggtcccagctacaatagaggctgaggtgggaggatcccttgagcccgggaggtggagattgcagtgagtagagatcacgcctcggcactccagcctgggcaacatagccagatactgtctcattaaaaaaaaaaaaaaaaaggccgggcgcggtggctcatgcctgtaatcccagcactttgggaggccgaggtgggcggatcacgtggtcaggagatggagaccatcctggctaacacggtgaaaccccgtctctattaaaaatacaaaaaattagccgggtgaggtggcgcacgcctgtagtcccagctactcgggaggctgaggcaggagaatggcgtgaacccggaaggcggagcttgcagtgagcagagatcactccattgcactccagcctgggcgacagaacgagactccgtctcaaaaaaaaaaaaaaaaaaaagccaggtatggtggctcacgcctgtaatcccagcactttgggaggccaaggcgggtggatcacctgaagtcaggagttcgagaccagcctggccaacatggtgaaatgccatctctactaaaaatacaaaaaaaaaaaaaaaaaaaaaaagccgggcttcgtggcacgtgcctataatcccagctactcgggaggcagaggcgggagacttacttgaacccgggaggcagaggttgccatgtgccaaaatcgcaccattgcactccagcctgggcaacaagagtgaaactccatctcaaaaaaaaaaaaaaaaaaatcacttgcacacttgtttggaagtctctagaaattttgtgaatcggtttcttaaatatatttattaaagacagttttgaagtagcaatgagggaagtttgtttaccattcatcaggaagaaaaccagagctgtaagctcttacttttagtattaaaatatggctgtgaaggaaaaaaataaatgccttaaagacaaataatggaatgaggagctatagaacaaagtgacataaggcaattttggttgaaaaatagaaatgcaattaatttagattccactaatttgttttaatccatctagagttgaggtttacctctatgaagaaaagaatactaaaatctattaagatatgaggtagagatcagactttttaagaacttttaatgtttttaccatttgcaaatggcatttataactttcgtatacatagtaaaattatgtatacaataattaaatcctcttagattctctgctttgtaatggcaattattatttgtacctctaagtaatgatctatttgtaaaaaattttctacagcgcctcttgaattagagatcaatttaatgcattctgagaaattagtaaatttttaacgtatttctagttgaaatattgggttctttcaggcaagtatatgtataccctaaactttctttggaagttctggatcctagcaactataatataaaaactttgaattcatttgtacatgacgaaatgagatagccacgataggtgttagaggacttttacccagtggaggaacatgttttactctgctgcattggtcttttttttttttttttcctttctttttgagacagggtctcactgccacccaggctggagtgcagtgatgcgatcatggctcactgcagccttgacctcttgggctcaagcagtcctcctgcctcagcctcccaagtaactggggccacaggcatgcaccaccacacctggctaatttttaaatttttatagagatgaggtctcaccatgttggccaggctagtctcaagctcctgggctcaagcgatcctcctgcctgggccttccaaagtgctgggattacagatatgagccgtggtgcccagccttgcattggtcttataactcaataatgtacgtgaaattattgtatatgccttcttgtatatgagaattaccacttctacatatatattggagggcaagtcaagtaagtgtgacaaacatttttcactaggctaggccaactcatgtctgtgttcatgttgagaagtaattctatagataaggcagaagagcagacaaactcaggatacaagtgtgcaaagatgtataacagacatgttgatcattgtatcatagcatttttataatagcgaaagaaagaaaagaaaggggaagagggaaaatgaaaaagaaaaaaacagaaaagattcatatgcccaggaaaaaagtctgggagagtatgtaccaaaaaatgtttaaaaactttgattacaatggttttgcatgggtgatgatgtcatagtggtttttgattttgaggtcttttatttgtctatatttaaaaagttttccattgataatttttgcaatgaaacaggtattttaatggaaattataggtgtagatgatatgtggaatgtttatgctagtcagaatttttggtgaagataacagaaatttaccttgaccaacacaagaaaaaggcaatttttataagtctgtcacagaaccaaagaacaaggtccaggaaagaagaagccagggaagctggcaatttggagcacagccaagatggtccctgccctaggtaaagtcttcagaggacctcacacctcagaagtcatctctgctatgggctgtgaatcccaccatacctacaatgatctcagcatcctgcctttttgtgtcactccctcgaggttcaaagcccttggcaagaacatttgcagatgccccagctgtcagagagaaaagattatcttcctcctttagcttccacagtgggatgtgtgaccctgcctcctgcctattttaggactctgcctaaactaagtgttctggtgctaggtgaccaaaaccaaaaatccacgaacatgttctaacaaaataatgctgtgaaggtttcctgatgatccatgttactcccatagtatctcccctcttcctccctactacttaccagcaagagaccgtaccacctatttaggatcaatgtaaagcagagctaatatctgaaatcccagtttcttttcaaatgcttccctttccaaatttgaagccagaagaaacaatgtatcactgctgatgtcaataagacttccttggctgggcaccgtggctcacacctgtaatcccagcactttttgagaccgaggtgggcagatcagttgaggtcaggagttcaagaccagcctggccaacatggtgaaaccccaactctactaaaaatacaaaagttagctcagtgtgggggcacacgcctgtaatcccatctacttgggaggctgaggcaggaggatcgcttgaacctgggaagtggaggttgcaactagccaagatggtgccactgcactccagcctgggtgacagagttagactccgtctcaaaaaaaaaaaaaaaaaaaaaaaaaaaaaaaaaaaaaaaaaaagactctaccgcagcaaaactggtgataatcttaaaatttggaaaggaaatgtccctagtaaagatatttgatttaaattacaaggaatttagttctaagggataatcgacatatttcataaataaatgcagatatctctagatatcaaatgataaaagatcttgagcagtgatggattactgctaatgggtttctgtctgctactctgagcacagttcaggctcaagaactgacatgaagggtttgagaatttagtcaaaatctggaagtaggcaggtggtcacaggctaactaagagttcataaccggatgcagtcgttgaaggacaattgtgaagaaaaaatgctgatggtgaaacgaatgcaaaaaccacaaacacattgaagaggcctatgttcctgggaacaaagaggaaggttatcaatgatgtgcttgtagaaaacatattaatactggaatattgtcttctttcccatcatttcaggtcagttagcttagattactattcagctagaaaaaacaaatgatacccttgcaaggactctgaacaatattggaattcagctgttttgtttctaataaaacatggtttaactgttacatgaatagaagttccttataagtgccaattacttctttccagagaagcagtgctaaagattctgttcattggtacactaagtgttcttcatgacccagtgttttatttcctataagttagctttttttctcagatgatttaatgaaaattatggcagtctgctcattgttcagcaaaatccatttcctcttctccttgaacacaaagcttgactatgtttcctagatggcccttgcagttagttggggccatgtgactgggttctagcttgttgattataagtggaagtgatgctgccacttaaaggcttgaaagtgccactgcatactgactgagatgcagtggaagccctgtgtttatgaggtggaccccctctcaggctgaaatgtctcttaagagtcatttcagcaacctatttacttgcccaccaagagagaaattgtgactaagaaacttttatggggctgtgccattatatgcttgtatccatttgttactgtagcctatgctagtaactaacacaataataaaggtttttttcagtcttagttttctattcatttgtagaccaattgtaaatgtgaatattgtatttccattgtatcttggcttacatgttcaaagcaccataaaacagataaaaggattatattaacaagtacttaatgtagaaaagatcagtgcaagggagtctatggaataacatgcaaatatgtctctttcccccaaacttagtgcttggctcatagtaagtataaaataaatgcctgttgtttcatcaataagtagtcctcccctctcaagctgcagactgacattttaattgctcattggacatttccaaacaggtatcttacaggaacaaaccacatgacatttccaaaacgaatctcttccttgccagcctctgcctactctgcctccaccaaactacctttatccttctggctctcctgttttgattaatggtacccttggaattgtcctctgttgactcccataaccaaatggttaactcgtcctctaaatttccaactacctttcctcctatcagccccactttttcaccactctatccaagcaagctcgccccaccctttctcatgtctaaattggcaccgtgtgctaagagttcccaggctttgggttttctcaccaataacatttaaaaaaagggtttaggaccaacatagaattcccaacttttaattttgccagataaagacattctttaaaaaacttatcttttattgttctatagactatttttaaaatggcaatgtagggaggactcagctttagaatataggacactcctctacattgaatttaattttatgagaattcactaccttgttcaagattgagtagttggaaactcttgtctagatcagcactggccctgaggtcttgatgtggttttgtggccagatgaatgtttctgagttccagttccagtgctcctccggtcaacaacagcctctctggttccctgtggcctgctttcccccacctggcattaaaactccccaaagaaggcctcatactaccttccagtgttatctctaatttccaggcaaattagaccttctgttattcctttttcttttctatctttgactatgcagttcttgcacctgtacagtctatccttttttccccaccacgcaaaattctacccaaaatttaagaccacatttgatatcattgcctcctttgaaacctttgatgatccattttacccacacaaacaagagctttcctctccttgaacttgcataacatggtaaagtatagcacgtggctgctttcttccacatgctgtgcttatttacctctcccacaaaattacaataaatccttaaagataagaaaaatgtttgattcatttttattacccctccattatttgaacattaaatgttgaatatatatttaatgacttaatgaatactttagacatagtgaactccagactttaaaaagtatctttgaaacatttaaataactttaatcttcaatgtcaagtaaataacagtagggtattggggaaacagattgctaagtaacttctttattctttccaaaatgagggaaacaaaactaaattccagtttccatgatcataacacagaagcttttctactataaacattgtattttaggctcctacccaggaattgtcttttattttaggtggctaaccaggaattgaattgtcttaaaagacaatgtgtaggagaaatagcaattacagatcttcctaactctgatctaattttgtgtacaagccatttttagtgaaggtacttgggcacagcttttattcctttagattttgtattcatcaaaaagcgagaaaaaatggggtgacaaaactcatctatttccctcttatttcacttttgaaggaaatcagagcacttgtacttccatgttctgtctttgacctaagaaatatttatttctatagtgttctattaggaaaatcaatattggccgagcaccatggctcacacctgtagtcccagcacttggctgaggcaggcagatcacctgaggtcaggagttcaagaccagcctggccaacatggtgaaacactgtctcgactaaaaatataaaaattagctaggcatggtggtgcacacctgtaatcccagctactcgggaggctgaggcaggagaatcgcttgaaccctggagttggaggttgcagtgagctgagatcacaccactgcactccagcctgggcgacaagagccaaatgtctcaaaaaaaataatatgtaaattttaaagttttattccacttatatgaataatagaaaagtccacaaagattaggtcaaatatattctatcttgttattaatcgtttttgggtttttttgttttttgtttttttgagacggagttttgctcttgtcgcccaggctggagtgcaatggcacgatctcggctcattgcaacctccgcctcctgggttcaagcgattctcctgcctcagcctcctgagtagctgggattacaggtgcccgccaccacacctggctaatttttgtattttttagtagagatggggttttgccatgttggccaggctggtctcaaactcctgacctcaggtgatccacctgccttggcctcccaaagtgctagaattagagacgtgagccaccacgcccggccatttttttgcattttttagtagagacggagtttcaccatgttggtcaggctggtctcgaacttttaacctcagatgatccacccaccttggcctcccaaaatgctgagattaccagtgtgagccaccatgcccagctgttattaagtgttttatggaaggtatgaaaataaaagacagaaccctataaaaatatagaacttttcttggctcttagcactggccaggaaaatacaatttgtaatctgaattttagagcatgtggtaagaggctttttatgtgtagctgtgcactacaactagagatgggaaaaacataatggttttttaaatttattccttttaaaaaataaatttcttaacatccagttctagtcacgattgagtagctggtactggactcacctttctgatgtaaacaacaatagaagctagacacattacgtgaaatgacaacatgcgtcactggattattatccttcagaaaagggaagcacgtggccaacctcacattcatcccagcacagagagatggagcccaaagagagagcggcagtgtctctgggcagaagaaacaaagatcggagctcaggccttctaacacagctgggtttggagggcaaggtcacttagaggcaggagctacagaaaaggagccctcaaaaattgcattaaaatttccctcagctattcagcccactgttaagatctgtatttgcagggcaagacttcagaatgtctagcagataatagtttttgggaggctgagagctgaacagtgatttcagaggctgcacaataatgtggatatgcaagaggttaggctcattctaatgtagaatgtgtaaaccttcgtggatgtctaggtattcatggagactctagaaagcccacatcctaggattatggaccatgaatgaccagtgttacacagtaggagtgagggctacatttatttatttattatttatctattttttaaatgtaatactgtttatttaacttcaaaaacatttcaacattctaagcaaaaaataacaaaacagcaaattgtgtttaagtacagaaggttcttgaactttcattgatacagtggctcttcgctttgctgacaatgaagagttctacagtttgtttaaaaacaaacagttgaaaaactaccccacttaattaaaacaaaacaaaacgaaacaagaaaacttctcatgccagctgatcccccattgtccacggctaagatggcagcagaatgctgtcattatatacagaaacaagacaacctgaagctaaatggatgccactgcagagtcaacaggcccagcctcacagtgcaggttctgagctatcgcccctccaaaaggcatcttctccacagcctcgatgccaagcaaggagcatccgagttcgtctcgtttgttttgttctttttacaaatatatatatatatatacacacacacacacacacaattgataacttagaatttctagccaataaccatatagttaataccaccttaccaaaaaaaaaaaaaaaaaaacagaaacatctttagatgccttgtcacacaccaatagcaaagtgcacagagggaggagaacacgagagtgccttttcattttgaaaatgtttgtgtggggtcgacggctgaggagaagctgggagcgagcccaggcggcagtttttaggtccatcagcactgcactgcaggaatggcagattttgggatctctgctggccagtttgtggcagtggtctgggataagtcatccccagtgcaggctctgaaagatctggtggataagcttcaagtgttaactggcaatgagggccgcgtgtctgtggaaaacaaccagctgttgcagtctgcccacaaataatccagctttgacattattttgttgggtttagtcctgggaagcaccactctactgagtgctgagattttggctgaaattgcccggatccttcggcctagtggatgtctttttctgaaagaaccagtagatccagctgtagataacaacagcaaagcgaagacagcaagctgtgttcagccctgactgcttccggtcttgtggaagtgaaagagctgccatgggagcccttaagccctgaggaggtacagtctgttcaagaacacctgggtcatgaaagtgacagcctgctctttgttcagatcacaagcaaaaaaaaaaaaacaaaaaacaactttgaagtgagttcttctagtcagcttaagctttccatcaccaagaagtcatctccttcagtgaagcctgctgggtaccctgctgctgccaagctgtggaccctctcagccaatgatatggaggatgacagcatggatctcattgactcagaggagctgctggatccagaagatttgaagaagccagatccgacttccctgcaggctgctccttgtggggaagggaaaaagaggaagacctgccagagctgcacccgtggccttgccgaagaactggaaaaagagaagtcaagggagcagatgagctcccaacccaagtcagcttgtggaaactgctatctgggcaatagtttccactgtgccagctgcccctaccttgggataccagccttcaaacctggggaaaaggtgcttctgagcaatagcagtctttaccatgcctaggagggacccgacatgggacacatctgctcctttggccaactcctgttcctcaaatcccaccacggtgctcctcccacctcctctggatttcttctctctgagatccatttgcaaagtgggtgcttagcagacagattgaagctggctggggggggcacagtggtgtgtagtgtatatcaaaagaccaaggtattatggggccccattacccagaatgggatgggtttcttcacctcatgttaagagaagggagtatgtcctgaagaagcccttctcctcatgttaaaatgctgaccaaaacactcttgagcccaggcatccttgagcatcaacactctgtgacaaagctccaggccctggcccctagtctaatctcagcaatgctgccagctacttgtctttcagagttgttagtttactccatacttcgtgacacggtcaagtgtctcatgacctcagggtaccagaggagtcattcactggttggcgtgatgatatccagtgtccctctgcccccttctacccccagccccattttactgtagcattgcatctgtgtcctgttgccatttctgttaaccttcaggtattaaacttgctgcatatcttgaaaataaataaaataaaaatgtttggaaatatgtacaaatttgatacagtttcagggttctctggacacccatggccacttcatgtaaaccactgacaatttctagagcactttgagaggctacaatatgatcatgatcaaattttataattctcagataaaagatgtgtcaattatgtcatatgagggctaaatttaaatagacacttgctgctagaacaagattcaacattcagaagaatataatctagagcccatccactgtattaatcactatatacagcatacaaaaaaaagtcactgaacatgcaacaaaaaaagaaaaaggaagaaacaaccaatcaggagataaaatagtaaaagaagcagacccagagatgattcagatacaagagttagtggacaaggatttcaaaataatgatcatgagtatgttttaaaaaattggaaagatggataacatggatgaaaaagtactttaaccgatcatttgaatctatgaataggaatcaaatggacattttagaaatgcaagttgaaatgtctgaaattaagaactatttgaatggttacagcaccaggctagattcaaaaatagtcacagaaaatattcaaatggaacacagaaggaaaaaaacataatggggataaaaaataacagagagagatgtggggcataggcaaaaggtctaatgtatgtgcaattagcatttagaaagagaagagaaagagaaagaacataagtaatcttgaaaaaataatggctgagaattttcctaatctaacaaatgataaagttcacagattcaaaaagcttcacaaaaagcttcaagcaggataataaaagcacacctaagcaaagcacaataaaacttctgaaaacttaagataaaaagaaaatctcttttttttgagacaaagtcttgctctgttgcccaggctggagtgcagtggcactatcttagctcactgcaacctccacctcctgggttcaaatgattcttgttcttcagccgcttgagtggctgggactacatgcatgcgccaccacacccagctaatttttgtattattagtagagatgggatttcaccatgttggccaggctggtctccaactccagacctcaagtgacccgtcctcttcggcctcccaaagtgctgggattacaggcatgagccaccacacctgctccaaaaagaaaatcttaaaagcagcccagggccaggcatggtggctcacgcccgtaatcccagcactttggaggcgaaacgggtggatcacctgaagtcaggagttcgagaccagcctggccaacatggtgaaacccgtctcgactaaaaatacaaaaattagccaatcgtggtggtgtgtgcctgtaatcccagctactcaggaggctgaggcaggagaatcacttgaaccgaaaggcagaggttgcagtgagcagaaattgtgccactgcactccagcctgggcaatagagcgagactcttaaaaaaaaaaaaaggcagccagaaaaaaaaatgatataatttctcttggggaacaacaataaagataactgatctcttaacaaaaacctatggacagcagaagacaataacatctttaaaatgctgaaagaaatacaaagctaaacaaaaaccctgtcaacctagaattctgttaccctccaccaaaaaatacttcaaatatgaaagtgaaaaaaacgtcctcagacaaataaggactgtgaagttgcacacctagtagactaacatgagaaaaaatcctaaagtaatttatcaggtcagagaaaatgatcccatgtcatcatgcccagtaaatatgaaagaaggccatccaccctttttttttttgagatggagtctcgctctgccacccaggctggagtgcagtagtgtgatcttggttcactgtaacctccacctgctgggttcaagcagttctcctgcctcagcctccctagtagctgggattataggcagctgccaccatgccgggctaatttttgtgtttttagtagagacgggttttcaccatgttgtccaggctggtctcgaactcccgacctcaggtgatttatctgcctcagcatcccaaaatgctgggattacaggtgtgagccaccatgcctggcagaccattcactattaaaacaacaatcataatatatttgcagggtttataacataggtagaaaataaaatataccatcttgggcaacatagtgagaccctgtctctacaaaaagttcaaaaaattagccaagtggtgggaggctgaggtgggaggattgcttgagactaggaggtagagattgcagtgagctgagattgtgccaccgtactgcagcatgggtgacagagccagaatgatacctccctaaaatgaggaaaaggtaagaatatgcattatcaccacttctgtttgacattatattgaaaatcctagccagtgtgataagacaggaaaaagaaataggtgtgcagattgaaaaagaatgaagcaagactgtctttatggcagtcatgattatttacatttaaaatctttaaaaatctatgaaaaaatactaaaactgaaaagtgaatttaagaatattgtgtaatacaaagtcaatatacagtcaactgtatttttatctgctaccaacaaacaattgaaatataaactttaaaaatgccacttagatagtattcaaaaatataaaatatttgggaatacatttgataaaatatcttcaagacatttatactccaaactataaaacattgtaagaaaatttagcaaatacctaaatgaatggcaatatataatgttcatagaatagaaatttagtattattagggtaataattttccccaatttgatatatagattcaacataatcctgatcaaaatactaagcagccctttttttttgtaacaaatgaagctgagtgtgaaatttatatttatatggcattggattggaatgagaagtattggcatagactgggcgcggtggttcacacctgtaatcccagcactttgggggcccgaggcgggcagattgcttgagcccaggagttccagaccagtctgggcaataggctgggaaaccctgtctttactaaaaataaaaataaagaattggtgtagattcatggttttcaatacacataagttaggtatagaaaattcaaagacctaggaaaaacaatcttgaaaaagaagaacagagttggagagcttataccacctgattataaatgttatagtaaccaagtaccatgggatattggtgtattgatagactacagatcaatggaacagaatagagagtccagaaatgaatctccaatatatggtaatttatttacttgtttattttttagagatggggccttgctctctctcaggctggagtgcagtggcacaattttagctcactgcagcctctatctcatgggctcaagtgatcatcccacctcagcctcctgagtagctaggactacaagtgcacaccaccacacctggctaatttttaaatttttgtagagacagagtctcactatgttgctcaggctggtcttgaactcctgatctcaagcaatcctttccccttggcctcccaacatgctgggaatacaggtgtgagccaccatgttcagctggtaattgatttttgacaaaagacccaaggtcgttcatcaggaaatgaatatatttttcaataaatggtgttggaaaactggaaatctgtaggaaaaaataaccttgacctctgtcccatagcatacacaatttttttttaaaataggggaatacatttctgaatttagggtaggtaagtgtttcagacaggacacacaaaaaagtgcactagccataaaattaaaaacgtatacattggactttgtaaaaagtaaaaattcctgctcaataccattaagaaaataaaaggcaggccacagtgtggttgaaaacattctcaatgcatttattgaaaaaggacttggatccagaatagatgaactcctacaaaccaatcaacaagaaaaacaactttataagtgggcaaaaacccaatcagacttttgacaaaggaagatgtataaatgcctagtaagaacatgccacgtgatggggatttggtgagggtagggggaggcagctgcaatgggttagaacagtatatcagagcctgagaagggtgagtaaagcatccccacagtgggaagtcctggcatggtcagagcccaggtagggggagaaggctaatcatggaggaggaagcctggcatggaggaattcagagctccagcagagagagagagagaggtggtcatgtccagggacagttcagcatggcatattggaataggagccccagggtaagacaaatatccagtgttggatatcacagcctgagctaggagagcagagtccatagaggaggtagcccaacctggggagttagagcctcagccgggtaagagaggtgttactgtgaaggtggcccagcatggggagtcagagcctaagtggaatcaggagggcatctactggagggaggctcaaagaagattacaaggtgaagatttcaagaggtgaggtgaagagggcacactggcagagggatgacctagaatggagtgtcagagagtgaacatgatgaagaggttaccacgctggggaggggatggcaatgaacatggaagattggatgcacttagcacattgaccaaataagtgaatataataaggacagcacatgtcagagaaaggggctattggatgcagaaagggggattggatttagaagtattggcatacgctgggcatggtggctcatgcctgtaatcccagcactttgggaggctgaggtgggcggatcgcttgagctcaggaattcgagaccagcctgggcaacatggcaaaaccctgtctctactaaaaataaaaataaaagaagaacaaatattggtgtacactcatggttttcaatacacataggtacagaaataaatacagatgtaaatgtatatgtttgtgtgtctgtatgtgtgtgtatccatccacatattctccagctctgttctgagagaggccctggaagcagtaacatgccataacattgagcacaccaagtacctaaattttggtttctagatacaatttttcactaaaagaaactaggcttccttggagaaatggctgattccagggatggacagaaaaaatacaggggattctggatatttttgttccagagaggaataggttgttccaagaatgataagaacatgtgtgtcaaaaggacacaaaagccagtttggagagccacatttagtaccatttgagtattaaaataaatgatagattatgacccaccgaagaatataggaaaccacaagtttatgcagatataaattaataaatgaacaaattaaaaatctgtctgggaagcaacttgttaactaatctgagagtacctctgcaaaagtattacttacaaggggaaaacaataattttttagcggagaagacttgcaaacaccaccttattcagtgatcagtgaacatcatcagtaaaggggcaaatgaaagtgatgtgccttctatgataaccttgccaaagctgcataatctgaatgtaattatgaagaaacattagataaacccaaattttgtggacatgtctagaagtgaaatttttagataaacccaaatttggggctgttctacaatgcgattggcctgtaaacttccaaagtagcaaggtcatgaaagtcaaggaaacctgagaacagttccagcttggtggagactaaagaaatttgacaactaaatgcagcatataatttttgaatcatccttttactagaaagaatattattgggataattgttaaagtttgaggctgagcacggtggctcatgcctgtaatcccagcactttgggaggctgaggcaagaggatcacttgagcccagaagtttgaggccagcctcggcaacatgccaagatcctgtctctacaaataaaataaaataaaatttaaattttaaaaaagcttgaatagggtctgagaattagatggttgtatgcaccaataatttcctaatttgatggttgtatgtggttaagtaggagaatgtctttgttagtataaaatgcacactaaagaattagggggaatggagcatcaggttggcaatttattctaaaatgttcagaaaaaaaagttctttgttttgttcttgcaactttctctaaatatgtgattatgccaaaattttgttaactattatcatcacacacacacacacacacacacacacacacacacacaaaataataccaagtgtgtgtgaggaaagggagcacctgtcccactttggaaaattgtgtgtctgtttcttataaagttaaagttacacctaacttaggtgtaacaaacttttgcttctagacacatccacaaaaggacctgtgtgttcttagcagttttattcaacatacccccaaactagaaagaacccaaatgtccattaataagcaaatggataaattgtggtttgtcaatacaatgtgaatactattcagcaataaataggaatgagctgctaacacacagaacaacatggatgaatctcaaaagtgttatgttgcatgaaagaagtcagacacaggtgagtttatacttatgattccattgatatgaaattcaaggacagtcaaagctaaactatagtgattgaaattagaatagaatagttgttgctttgggggaatggagattgactgaaaagcattgtgggaaaatttctgggtgcagaaatattttatatatatttttttttttttgacagagtctttctctgttgccctggctggagtgaagtggcgtgatctaaactcactgcaacctatgcctcccaggttcaagcgattctcctgcctcagcttcctcagtagctgggattacaggctcccaccaccacacccagctaattttcatgtttttagtagagatggggtttcaccatgttgaccaggctggtctcaaactcctgacctcaagtgagccacccaccttggcctcccaaagtgctgggattacaggcgtgagccaccgtgcctggccatgttttatatcttgattgggtggtggtatatatttgacagaactaatcaaattgtacatttaaaatctatgcatattgatttaaactatatctcaatttaaaaagctaactatatctcaatttaaaaagctaaaaactttaaaacgtactaaatcctcagcagtggttatctctagggaacaggattcccacattatgtatttctgaggttttgaactatttcaaccagtatgtcttagttattaaaaagagccacactgagcatctaaaaatataattacatgaagattgtaggatttgtccaaattgcactccagcaattagttattttggggaaaacttaagttagatcttcttttaatatatacaaaaactgcttagataagtcaaagaggtaatgtataaaatcaagccataaattttaaattgtcaaataatagaaaacaggggttaacatttatctgctttctgagttgcaaagaaactttcaacagttaaaagtaatgttaggaactctaaacaagtaaatttttgctgcatgagaataccccaatacataatgaaatggaagcaattaaatgcaacaggaagttgggggaatctacaaaaacataaggacattcaacagatttgtaactaaaggatgtaaattctagaaaggaaaaaaggatagaaagaagggaggggggaaggtaggaaagaaggaatggcaggagggaaagaaaaaagacaagaagaaaaagggaaaggagttaaggaagaacagacgagggagaacacagatggctaatcagcaggtgaataaaaagtaaacctgaatttttacacccaaattaaatctatcaaagtagcaaaattattgttaaatgatagcattcgatggcagctgtggcgtggccagatgaatgtatgttcaatacatggaggggtgtaattgttagatttctgaaagccaatctagggatgtgtagtgataatctttaatatgattatatattttgaacgagaaataaccacattttggaatccgtctaaaagaaataataaaaatactgttttcaggattattcataaatcaaaacaagaaaaatagtctaaatgccaacattaagggactaattcttaaattatgagacatccgtttgatggattattattctaccattaaatggtgtttacaaggggtttttaataccacgtttttctttttttaatgcttttgtgtgtgtgtgtgtgtgtgctcacgataacttaaggatagcaaggctgaactcgttcagttcggaaatagaaacttcccggcacagttggcctgtaagacacgcttcagttttgttctccttcattgtatttaaatactgcctccacaccccctctaccccccacacacatacacacacacacgtgtgtgtgtttcggggctgctcaggaggacaggcggctctgcgctgcggctgtggtgggctccgtgcacaccgcgctaggctcatagggcggctggcaggtccagagagcggcgtgggagcagctgctgccacggtggcagcggagatgaaggtgtcagcctgacgcgggcggctcctgagagctcgctggggcgcctcagcgactctcacatctgttcagcatctggctgtcaccccctcaagagaataacagatccccttcccttctcccttccaaatgtccctcaagttcctcccaaggcaaactccagctggaagggggcatactgggaagtgtagttcccgttgctctgcattgcggaggaggggcgggaaggatgctgagcgctgcctgtctatcccaaacaacacgccaggtcaagctggaaatcatcccaccctacctgtcagtcagccagggagtcagaaggccacaggttgagtaggaaaaggatctggattatagatagcagagcttggactatacatagtttataagtaaaatagttttttttaaatgtgtatgtcattcccagtatattttattatacgtttgcaaaacaatacaagacagaagctgtattatttaaagaaagttatacaaatcttttagaagtttagaaaagaacagcattagaaagttttcacttgaaaccctcatatattggagggaatgtaaaatatgcagccactgtggaaaacaacttggcagttcctcaaaaagttaaacctagagttatcattataacccagtgattctattcctaggtatatccattttcatgtttacaaaaaaattgtaaacgtgttcacacaaaaatttgtacactaatgttcacagcagcgttatgcataatagttcaaacatgggaactaacccgcatatccaccaactaatgaattaacaaacaaaatgtggtatatctagacaattaaatactatttggccatggaaaaatatgaagtactgatacatgcaatgacatagatgacccttgaaagcattatgctaagagaaagacacagagccacatattttatttcatttatatgaaatgtcaagaataggcaaatctgcgagacagaaagatttgtggttgcctagggctcggggtgggaggaaacagggagtggttgctaatgggcttgggtttcttgtgggggcggggggataaaaatgttctcaaattagatagtgatgatggttatacaactccgtgaactgaacaacatttaaaaaattgtggtaaaatatacataattaaaacttaccattaaccattaaaatattaaccatttcaagtgtacagttcagtggtgttaagtacattcacattgttatgcaaacatcataaccagccacctgcagaagcttttcatcttcccaaactgaaactttgtgcccattaaacaataactccctacctccctccacctgcatcccgtggcaaccagcattctactttctgtatgaatttattattctaggcacctcagatgagtggattcatacagtatttacccttttgtgacttgcttatttcacttagcataatgtctacaaggttcattcatgttgtggcatgtgttagaattttcttcctttttaaggctgaataatattccattatacacttatgccacacttcgtttagccattcatccatcatggatacttgggttgctttcactcttttttttttttttttttgagacagagtctcgctctgtcgcctaggctggagtgcagtggcgtgatctcggttctctgaaagctccgcctcccgggttcatgccattctcctgcctgtctcccgagtagctgggactacaggcgcccaccaccatgcccggctaattttttgtatttttagtagagacggggtttcaccgtgttagccagtatggtcttgatctcctgagctttcaccttttgactattgtgaataatgctgctatgaacatcgatgtacaaatatctgttcaagtctttgctttcagttcttttggatatgtacccagaagtggcattgctggatcatatggtgattttatttttaatgttttagggaactgccacactgttttccataccgtgtataccattttactttcccaccaacggtgcacaagggttccaatttctccacatcctcatcaacactaattttctagtgttgttgtttataatagccatcctaatgagtataaaatgatatctcattgcagttttgatttgcattttgaattgtacatgttaggatgaattttatatgtgaattatatctcaatgaaaaaatgttcattgagagacccaagtagcaccaagcacaccttgtgcccagatcttggcttctaaacagctttcttcactaaagggggcccaatatggggcacaggaagtacaaggtgagcctgggatatttcactgtacaagaaagcaaggaagtgctcaaagaatggcaagcatgtctaaatgacactggtcaaatttgggaaaatttgagcatcaaaatgaataatgaccataattatttgtaaataccgcaagtaacaattcatgaggccgggcgcggtggctcacgcctgtaatcccagcactttgggaggccgaggcgggcggatcacgaggtcaggagatcgagaccatcttggctaacacggtgaaaccccgtctctactaaaaatacaaaaaattagccgggcgcagtggctggcgcctgtagtcccagctagtcgggaggctgaggcaggagaatggcatgaacccgggaggtggagcttgcagtgagccaagacagcgccactgcactccggcctgggcgaaagagcaagactccgtctcaaaaaacaaaaaaacaaaaacaaaaaacgaaacaaaacaaaaaaaaacaattcatgaattcatggtaatagaaagagagaaaaaggcaattctttatggaaaagtgctagtagctaatagatgtaaaaggaatgatagaattttaaagtcaccgttttacaacttctaatgaaataattttggttccagcttggtttggatggcaatcccatcccaattgctgggattggcaatggatgttacagccattaggtgaacaattactagagaaccaaatattcacatgattatttgaatcatgcagattattcgttaactgcaaatggaaacatacatttgcaatgaagaaatctggcaattaccaccttaagcaagtaatcaaactcaacatcatgaatcatagaaaaacttgatatgtatgcttcctaacatgatgtaatattaagcatacaacatcacctacaaagcatttttactaaaatgtgtggcctgagtgtaagcaagctcctctagaccgggtctctacctttcaggaattcagggaatagtgggacaatttaaagaacaccatgcagaatatttaacaaggcaattgacctgaaatcttcaaaaagccaatatcatgaaaagaagcagtagcagtagcaaggggactgctgtagatgaaaaacacttgagggacctaattaaacaattgcaacaacaaaacacacctgttcagtgagggcctactgctagctgtactcagattttataaatgaatgcaaaaatgatgcaggcacattgatttatcatgtattagcgataatctaaaatatttattattaaaacattttaataaatggaaatttttattgcaattttctttcgtattcccccccatgggaaaagaaaccataatcatataaatggctatccttgaaagcagataatataacatgtgctccaagatatttgtatgatttatcactaaatcacagattcagcctggaagaaaatagaaatgtatggaacaatttttcatttaattgggcatgagaaacctttctacctgttaatgtcattaattgcaacatgggcatctccataacataatatttctagacataatgtgcttttttttttttttgagacatagtctcagtcacccagactggagtgcagtggcgcaatctcagctcactgcaacctctgcttcctgggttcaagcaattctcctgcctcagcctcccgagtagctgggattacaggcatgcaccaccactaccggctaatttttgtatttttagtagagatggggtttcgccatgttggccaggctggtctcgaactcctgacctcaagtgatccacttgcctcggcctcccaaagtgctgggattacaggtgtgagctaccacacccagctcataatgtgcttttaaaatatcactgtccaacagaaatataatgtgagccacaaatgtcagcccatatataattttacgttttctagtagtcacattaaaacaagtaaaaagaaaataggtaaaattaattttaatatttatattttactcaatatatccaaaatactatcatttcaataactaatcagtataaaatgattaaagagatattttatattcttttattgtactaagtctttgaaatccagtgtatatattacgctttcagcaaatctcaattgggactggccacatttcaagtactcagtagtggcttacatgtgggacagttccagtctgaaataaaaatactgggcctaatagaattggctttacgtgttgcaagtgagcagtattaagtaccacattttcaaaggtgaactttccaaatacgtacttttgatttgcatttgttctggaatattttcaagaatggaaaaataagctgaaaaattctatttacctagcaagcaactaatatttttgcatttaggataagagagtggagataacagtgaaaagaaaagagaaccttcaagctttgtatgtatatgtcagaatcatgaaacactgaattaccttataatacagtttgccactagggtctgaatgctagggacataaaagttccaaatcctgtctatccttccttcaaaccagactttgcattttcccgttaggttcccactgcccagaccttcttaacctaaactctttgccagtttttaatgtaggcttccaaatagacatgatctgtgtggatgcatgggaggagaggggagtgaagagtctggacccccacaaaccagtcttggctctgccaataactgaggaggatatccagggaaatgcctttcaccccctgggcccggtttccttatctatgagacaaagagatccaaccaggataatcctacagattcttctagatctttattatttcattttcatgaacacttttaatatacgtatgttacatatagtcattctcacccaactacctgggttggtaaagaagacttctctctgttgtctccgctcctgaagttgccccagctctgcctcacagataccgccagatttgtccttcttttccatgcccctgcctcgaagaccaggtgtagccccagccacctcattgtgtcccagccatccttaatggaaggtttctattatctggactaacctcatctttccaccttgaatgccatctacctccccgcagcaacccaggctcatgcaatttccctcagctaagacattctccccaaactccacctggctacttaagtcctctttcactgcctagtgtacatttcattgccttcaaggcacctctgctgtcctgactgttggcaggctgctctcatcttcctctgcccatgttggggtcacttgtggttcactgccattcacgtctcctgattgttcccatgtgtatcttatctcacttgcgagcctgcagggacagcttactgattcctacagattcatgcctctgtactctcctcagcctcacactggtgctgagctcacaataggcactcagcagatacttatggacctttccaaggcttccccagagtttagggaggagacctctagaatgccaaaagacaaacataatacttgcacttgaaaaagtgtgtatggggcccactgctactttgcctggagaaaagatcaggttgtggaagacattggccatttgtggtagattaattgcaaaaatattctagagtcttcaccctgtcctatagccatatctgttgcaatgtggctttgcaggtcctcctattgggaggtggagtccacttccccagcctcgaatctgggctggccatgtgacctgctttggccattacaatgagacagaagagaaaaagtgccagttatgaatgtaggcttccaaaaaaacatgatccgtgtggacacatgggaggagaggggagtgaagagtctggacccccacaaaccagtcttggctctgctaataaccgaggaggatacccagggaaatgcctttcgccccctgggcccggtttccttatctatgagacaaagagatccaaccaggataatcctacagattcttctagatctttattatttcatgttcatgaacacttttaatatatgtatgttacatacagccattctcacccaactagactaatgaatgaaattaattgccagctattgtggaaaaatattctctatgtggaaagtactctgtatgtaaaagtgacactccagctgttgtgttcacatagttttagtaatcactaaccatatcttaaaccatctttgaaaatagtcactaaaagaggaaatactatttgccaggtgctttcatgcaccattgtctcatttaattctcgcaactctgtaagttagatttttctttttttgagacagagtctcactctgtcgcccaggctggagtgcagtggtgtgatctcagctcacagcagcctccgcctcctgggctcaagccatcctcccaccttagcctcccaagtaagtagctgggactacaggcatgcaccacactcctggctaatttttatatatttagtagagatggggtttcgccatatttcccaggctggtctccaactcctgggctcaagcaatccacccaccttgacctcccaaagtgctgggattacaggtataagccaccatgccctgcctgtaaggtggatattattaatattataatttatcttaacttttggggaaacaaactcacatacattaaacaacctctgtgaggtcacacaattagtgaatggtaggtggggctgggacgtagaccctggtcctacccagaatgcataccctccccactgggccacagggccctgcaacagttgggatatctcacagtgacacatgtctgttaaattagttacctacatgcattctagtgtgaagacaacccagtgatacacctttaaagctataaatttttttataccttaattattttcctcccaactttaggcctaggggcaagtccataatcagggttttcttctaactcttgtttctttggaacaattctcccaggtacggtctgtcatggtcagggatgcacatttcagagaatcacatgtgaatgttgtatccaaatgacatgatatctgacttcataaggtacactgatgagtggaagagaaagatgttcttataactttaaactttattggacatcagtgctgatagtgtagtgtaaattaatactctaataaatctacgattatcttagagtacataataaaataaaaatgtacctgttttgtattttaaagaaggtcacatttattatatgtaaaaattttaaatacgctccaatttttgtaacctttgctgaaagtttctttgttttataatatagacttgataaaaggaagaaatgggcttctattaagagaaacagtttctgttcatatccgagtcattcaaggtacagataaccctataaagatggctggtttcacgttagccccttttagagaggaacaaaatatacctaatttcttctagcaccaaaatagacaattattctagaaggatggttgtctacatacactctaatcctactcgggaaaccaggcagtgaatctattgacttcccaactcaaagaaactttcagcaaaaaacacaaaaacaaaactcaaatgtagatttctgcttctaggtgtgacagagtagttggtaccatattttctctcctactgagaaccactatgaaaactagatttaaaaagctattttatgaaagctgtttgaaagcactagagaagaagcaggatagctaggacttgaaggaccaatatcctgaagcaaagagaagtgaattgagttgttttctaaatgcattctcagtagcttttccccttggggtgtttgcaaattcacagttctggcggtggaagctgaatagaaagcagcagcccagaaccttcagcaagcttactgggcccgggagacaaaaattgcagttcagtgctacctagacagctaggatttaaggggtcaagatcccagaaaaaaggaaactacaaagaagtgagcctgaaattctatttataatctccttttaaggcatttgctgacaccaaagttgagcttataagattccaaaataaaataaaataaaataaaataaaataaacatgaagagaaaggtgcaaaggggctaaaaagctaagcagcgattttggcagtttcatatttatgaggagacaaatattgaagttcagaattcatcatggatgaaagaccctcgtaaaacccaggcccttcacttgagccccctgaacaggtgatgccttaggcaaactggatgtagagcagcattggcggaacaagatgatctgctttaatctctctgtctgatagtgtgaggagagtgtccatgcgggggcggtttggcgtgtcagagctggaacaacatgaagacagctgcccagcacagggtgggaaggtgtccatgcagcaaggggagggtgagagccagaccagagccaggtgagaagcacattcacaagggggagcccatccggggcgtggggatcccaagcagggtgaagaggatacccagggtgaggggcaagagctgtcacgggtgtcagagcctgagccaggtgaggaccggcattcacatgggagctggggaggccctgggtgaggtttcagagcctcagcaggggaaaggagggcctccatgtcgaaggccagcccagcattgggtgttggagcccgagcagagtgaggagggtgttcatacaggaggctggtctgaggggagttgttgaacctggacatgagttttgcatgagggaggagtgggtggcagtgatgtcaaactggttccatactgaatagctagacatattaaggatgattggagccaggtttctcactgtcagagaagagagcacaaacctggaaagggattaaactagaatgagccctgagatgctggactggaactgaaggtattggtgtaagctaatagttctcaatttacatagatagagatagaaataaatatagatagaaatatatgtatgtgtgtatgcatatatatacacaccacatacacatatatgcatacatacatattttgtgtgtacacacataatatatatgcatataattgtattatatagacacttgccctgtctactgaaagggcctgggagaaggaaccccccaacagtgaagagtccaagggaagcctgggacatattgttgtgcctgaaagccagaaagtgctaaagaatgatgaggatatgtgaaaaggacagagaaaccagcttgaaaggactcttactagccaaatcagggacaatttaagcatcaaaatacatagtgaatagtaatagattatgaccattgaattaaataggatggaagagtatggaccatgagtccatactgatataaataggtaaacaaatagaaagtttcacgacgagcaagacatttacgtgctctaaaatgatttccccataaatatttattaattgtgagggacaatagagtggctttagctacatattgagtgattctacttacattttttagctacacactgtatgattccatttatatgaccttatcctctaaagcacaaagacattatggaaaaggcaaaactgtagggatggagaacagatcagtggttgtttggtgtaaggggttgggggagggctttactacaaagcagcagcatgaaaaacattttctagagtgatggaactgttctatatcttgactacaatggtggttacattgttatatatatttgtcaaaactcatagaactatgcgccaagagtgatttttgctgtgtgcaacttttttttaaaccaaaaggagcaactttatagtggaaaagcctgggagacaacactttaatcaaacaatcaaagtgaacattgtcagcgatgagacaaattgaaacctgaaaactaagaggatgtagcaagaaaaaccagcacccacttttgtgatattcctgacaaaaatgcataacctgaatctatgaggaatcaccagagaaacccagatgaattgggattctacaaaatacctgccctgtaatctttaaaagtgtcaaagccatgaaagttaaaaaaaaaaaaaaggctttgtaatttttgtatacatatcctgtacatattttgttagacttacatctatatatttctttttttcagtgatcgaaaatgctattgtgttttaaattttggttttcacatgtttgttgctagtatatatgagtgatttttgtgtgttggcccaaagctttcttaattcatttattaattctaagacattagcttttttttttttttgagactccttggtattttccatatagacaatcatataatttgctaatagagacagttttatttctacctttccagtctgtatgctttttatctcgttttcttaccttattggtctggctaggattaccagtattgttgaataacagtgatgagaggggacatctttgtttgattctgatcttaagataaaagcattccgtctttcaccgtttaatacaatggtatctgtaggttttttgtaggtcctctttattaagttgagaaaattcccctttgttgttagtttggtaagagttttggggttttgttgttgttgtttagttggtttttatcatgaatgggtgttgagttttgtcaaatgctttttttcaatatgacaaggctgatgactgtgtgacttttcttctttgtcttcttaatatggtggattatacagattgatttttgaatattaaatcagccttacatccttggaataaaacactcctggttgtgtttattatttgtttatatattgctagattcaatttgccaacattttgttgaagatttttcttctatgttcataagacatattggtctgttttactttttctgtgctttctttgactgattttggtattaagattataatggcctcataaaaatgagttgggaagcgtttcttcttctattttctaaaaaagattgcataggattggtgttaattcttttttaaacatttagtaggttcagcataaaatgatttagcatcatttctctcttgctgctcatccattctcatccactgaaaccatctgggcctggagatttattgttcagacttaaaaaaaatatgaattcaatctctttaatggttataggcatctttaaattacctgtttcatattggattaattttagtagtggtctttttaaatgaatttaattaatggcttcactaacaatttacctaaattattgaatctatgcgtgtagaattgttcataatattcctttattatcctttcagtgtctacagaatctgtagttttattcctgatattagtaatttatgtctttgctcattttttctttgtcagtctactaaatgtttgtcaatctattgatcttttcaaagaactgacttttgttttgctgattttctctgatgtttttctgctcgtctttattctctcattccttctgctcatgttgcatttatttttctcttccttttctagtttcttaagagcttagattattgatttgaaaccatttctttttctattataagcatttagttctatacatttgcctcttagcactgcttaagctgcatcccacacattttaatatgctttatttttatgttcaatgcatttaaaaaattgcccttaagactttctccttgacctatgtattattttaaagtgtgttatttaatgtcaggtgtttggaaaattttctcttatctttctatttttgatttctagtttgattccactgtggttagcaacacactctatatgatttcacttttaaaaaaaattgttgaggtttttttttgtttgtttgttttttgagacggagtttcactcgtcccccaggctggagtgcaatggtgcaatcttggctcactgcagcctctgcctcctgggttcaagctgttctcctgcctcagtctcccgggtaatcgggattacaggcacgccaccatgcctgggtaatttttgtatttttagtagagacagagtttccccatgttggccaggctggtcttgaactcctgaccttaagtgatccacctgcctcagcctcccaaagtgctggaattacaggcatgagccaccacacccaaccgtgaggtttgttttatgacccagagtgtagtatgtcttagtgaatgttccatgagcttgttagaatgtgtatttggctgttgtgactcgaatgttgtataaacattaattagaccctgttgattgatggtgttgtttagttctggattcttgctgtttctgttcatagttctctcaattgttaagaatggggtattgatgtcttttagtataattgtagtttatctctccttttagtttggccaatttttgctttgtgtattttgaagttccattttcttgggcataaatatttaggattgctatgtcttcttggtggatagactcctttatcactgggtaatgccctctttttttctggtaaaattctttgttcttaaatctacttgatttgatgttaacattgccactcctgctttgattgatatttatatggtatatctttttcatgcatttacttttaatttacctatatcattactcttataaatagcatatagttgagtcatgcttttaaaaaatccattctgccaatttttttttaattggtgttatttagatcaattacacttaatgaaactattgatatattagggctcgagactaccattttatttttttgtttgttttctgtttattccttctgtttttctgtttctcttttttgcttttcctgtcttcttgcatgttgcttaaaaatttttggtctatttgatttatctatagtgtttttgaaggtatctgtttcataggtttttcagtggttactctaggtattgtattattcacttataacttaacactgttcacttgtatcaacattttactactttgagtaaagtgtaaaaacctataggttcctttacctcctccttataattctcttaaatatttactcacatactttgagaaccatatcacacagtattataatttttgctttgaccatcaaatataatttagaaaatccaacaggatagtttatatttacatattctattttttctcatcctgtcttcattccttatgtttcacgtttccttcttttgtcatttcctttttgcttgaagacttttctttagatattcttttagtgtaggtctgccagtatcaaattctgttagctttcctttatctgagaatgtcttgacttccccttccttattgaaggatatttttgatgggtataaaattctgagttgacagtttttttgttttttttgtttttttttttttgagactgagtctctctctgttgcccaggctggagtgcagtggcgtgatctcagctcactacaacttccacctcctgggttcaagcgattctcctgcctcagcctcctgagtagctgggattaccggcatctgccaccactcccgagtaatgtttgtatttttagtagagacagggtttcaccatgctggccaggatggtcttgatctcctgactttgtgatctgcctgcctcagcctcccaaagtgctgggattacaggcatgagctaccacgcccagccctctctcactgcttttgagatttttctttgtctttagttttcagaagtttgagcatgatgtgtcttggtgtgaatttctctgggcttattctctttgggatcttgcttgacttcctgaatctgtaggttcatatattttgccaaatttgagaactttgcagccattgtgtttaaaatattttttctgctccatctttctttttcctctccttttgggtcttaatgaggtgacatttaatattttattttcctgctataggtccctgagtctctgttcattaaacctgttgatcgggtttaatcatttttgtccttctagctttaggttcactgagtcttttcttctgtcatctccattttattaagccatccactgagttttaagaaattcaagttgttgcattttttaattctaaaattttcatttagtccttttttatatctcatatttctttgaatttttgttaaacaacttaaaatatttcatcccagaatagttcaatatatatctgtatcaatcagcttttactaagttacactgctataaaaaaataacctctagacctcagcagctttcgggaaaaaaagatttacttttctttacattacatgtaagctgctggtcatactctagcctttggatgggctatgggtctgctctacttgtcttttcatcctgggacacaggctgaagaagcaacctctatctgggtcataccattctcatggaagaaggaaaagaataagagagcagacagaaacttgcagtcccacttccagtttctgccagaaccagcaaactgtcacctttgcttacattttacccatcaaagaccaacatgatgtcaacggagtaaagaaatagactccttctttttttttttttaattttttgtattttttttttatttttttattatttttttttgttttattattattatttttttttattgatcattcttgggtgtttctcgcagagggggatttggcagggtcacaggacaatagtggagggaaggtcagcagataaacaagtgaacaaaggtctctggttttcctaggcagaggaccctgcggccttccgcagtgtttgtgtccctgggtacttgagattagggagtggtgatgactcttaacgagcatgctgccttcaagcgtctgtttaacaaagcacatcttgcaccacccttaatccatttaaccctgagtggacacagcacatgtttcagagagcacagggttgggggtaaggtcacagatcaacaggatcccaaggcagaagaatttttcttagtacagaacaaaatgaaaagtctcccatgtctacctctttctacacagactcggcaaccatccgatttctcattcttttccccacctttcccccctttctattccacaaaactgccattgtcatcatggcccgttctcaatgagctgttgggtacacctcccagacggggtggcggccgggcagaggggctcctcacttcccagtaggggcggccgggcagaggcgcccctcacctcccggacggggcagctggccgggcggggggctgacccccccacctccctcccagatggggcggctggccgggcagaggggctcctcacttcccaggaagggcggccgggcagaggcgcccctcacctcccggatggggcggctggccgggcggggggctgacccccccacctccctcccggatggggcggctggccgggcagaggggctcctcacttcccagtaggggcggccgggcagaggcgcccctcacctcccggacggggtggctggccgggcggggggctgacccccccacctccctcccggacggggcggctggccgggcggggggctgaccccccccacctccctccgggacggggcggctggccgggcagaggggctcctcacttcccaggaagggcggccgggcagaggcgcccctcacctcccggatggggcggctggccgggcggggggctgacccccccacctccctcccggatggggcggctggccaggcggggggctgacccccccaactccctcccggacggggcggctggccgggcagaggggctcctcacttcccagtaggggcggccgggcagaggcgcccctcacctcccggacggggtggctggccgggcggggggctgacccccccacctccctcccggacggggcggctggccgggcggggggctgaccccccccacctccctccgggacggggcggctggccgggcagaggggctcctcacttcccagtaggggcggctgggcagaggcgcccctcacctcccggacggggcggctggccgggcggggggctgacccccccatctccctcccggacggggcggctgccgggcggagacgctcctcacttcccagacagggtggctgccgggcggaggggctcctcacttctcagacagggcggttgccagtcagagggtctcctcacttctcagacggggcggccggggagagacactcctcacatcccggacggggcgacagggcagaggcgctccccacatctcagacgatgggcggccgggcagagacgctcctcacttcctagatgggatggcggccaggcagagacgctcctcactttccagactgggcagccaggcagaggggctcctcacatcccagacgatgggcggccaggcagagacgctcctcacttcccagacggggtggcggccgggcagaggctgcaatctcggcactttgggaggccaaggcaggcggctgggaggtggatgttgtagcgagccgagatcacgccactgcactccagcctgggcaccattaagcactgagtgaaggagactccgtctgcaatcccggcaccttgggaggccgaggctggcggatcactcgcggttaggagctggagacctgcccggccaacacagcgaaaccccgtctccacccaaagaatacgaaaaccagtcaggcgtggcggcgcgcgcctgcaatcgcaggcactcggcaggctgaggcaggagaatcaggcagggaggttgcagtgagccgagatggcagcagtacagtccagcttcggctcggcatcagagggagaccgtggaaagaggggagagggagagggagagggagagggagagcagaaatagactccttctataagaaagctacaaatcgcagggcaagagaagtggggacggaaggatatataatcctcacccagggaagagggattacataattgagaataataatagattcctacagcatttgcaaatagtaagtacattttcctatgtaatcacaacacattgtcacctctaacaaaattaacaataattatttttcttttctttgtttttctttttcttttttttttttgagactagttcttgcgttgtcacccaggctgcagtatagtggcatgatcatagctcactgcagcctcaaactgctgggctcaagcaatccaccaacctcagcctcctgggtagctgggactacaggtgcatgccaccatgcctggctaatttctttatttttactagagatggggactcactattttgcccaggcttgtctcaaacccttgggcttaagtggtcttcccatttcagctcccaaagtgttgggattacatgcatgagccaccacaacaggccaataacaattctttagtatcatctaatacctagtctgtatccaaattttccaattatctccaaaatatacttaaaatttactttattgaaaccaggatataaccaaggaccaatgtaatgtggttacatgttttaaagggagtgcagtggcacaatctcggctcactgcaacctcttcaagtgattctcctgcctcagcctcctgtgtagctgggattacagacatgtgccaccacgcctggctaattttttgtatttttagtaggaatggagttccattatgttgcccaggctggtttcaaactcctggcctcaagtgatctgccagcctcagcctcccacagtgctggcattacaggcatgagccaccatagctggccgagagtggttgtttaaattaaaccatactaggaggcaagaaggatgacaagattgatcattaagttaaggtttttgacaacctattcctccaatgtaaaggtgattttttttcctcttttaatcaaatgatgtgttgtgtgagacttgtgaactatgtgaatattcagtttctaaccaacttttcattcaaaggctttagcatccacagataagcctatctgaattaatcattttttcggttgtaataaaattataactttctatcattatttttacatttgttagctgtcaaacaatatgccctttctgtgtaaagaagggctttcctcatcaatatatacagtgtcatttatgagaaagatattaaaaataaaactcttaggattctatacattgagtttttaatctttttaaacattaatattataagtacttttctatatatttattttgaaaatattttgatggctatgcaaaatgtattatggtgatgatgatgatgagtataaatctaacaaaaatgtatggaatttatatgctgagcattacaaaatagtttctcatgttttcttgactttcacatctctgactctttaaaaaaattacagggcaagtattttgcagaatgtcagtcaatttggttttgtggttagattcaggttattcatctagaatttctagaattctggaatgtctacttgggttttaaaaatgttttcccatttttctattgagattccctatttaagatatttatacctgagccaggcatggtggcttgtatctgtaaacccagctactcaggaggctggagcaggagaattgcttgcacccaggagtttgaggctgcagtgagctatgatcatgatactgcactccagcctgggtgacagagtgagaccctgtctctaaaaaaaggaagttaaaagaatatattaatatttgttttaaggcctttctcagctaatttcaacatctgagttattcgtaagtgtgcttctactgatctcttgattacaggtcacactttttgcttctatgcatgtctagtaatttttaaaattatgtattggttggtttttttttttttcttgagatggagtcttgctctgtcgcccaggctggagtgcagtggcacgatctcagctcactgccagctccacctcccgggttcacaccattctcctgcctcagcctcccaagtagctgggactacaggcacccaccaccatgcctggctaatttttgtgtgtgtgtgtttttagtagagacggggtttcactgtgttacccaggatggtcttgatctcctgaccttgtgatccgcccgcctcggcctcccaaagtgctgggattacaggcttgagccactgtgcccagccgattggttagaataatctgttgtagaaactctgggttatggtatcttcctccaaagagcattacattttgttatggcagtgattaaattgctggcaaatcaactttatcctgtggggcttagttttaggctttgtcagggtagatatattcattttgcccttggttccaggatgtgatctttatccctaaggtgtggtaaggtgtggtccttttgacatttcaatggaaagcccaacatatttatccaattccttttttttttaattttattttaaatttaaatttaaatttatttatttttgagatggagtcttgctctgttatctaggctggagtgcagtggcatgatctcagctcactgcaacccctgcctcccaggttcaagcgattctcttgcctcagcctcccgagtagctggaattacaggtgtgcatcaccatgcccaactaatttttgtatttttagtagaattggggtttcaccatattggccaggctcgtctcgaactcctgacctcaagtgatcctcctgtctcggcctccaaaagtgctaggattacaggcatgagccaccgcactcagcctaattccaatattttcgtttgatttaaatgccaaattttatctcctagacagctgctaaaatctcatctcagttctttagcctccttctttttcctaggtttcttggagtcttgtcctgtggatacacaatttacaaatcagtcaaggatttgaggaaaacttatgtgaacattatgaatgtttcctttgtggctttctcctttctgggattctcgccctcaatttccaatgcctctggatcatttctcaaactctgatttctgtctgtctcaccagcctactaaaggtgccactctctgcttcagctcaatttctccagacactgcagtaggggacaagctgatttaaacgtggacctcacccagtgagctttccttcttcaagaataatattcattctcatctcttcctaacttcagctgccctccagtgccttcacacagttgtctttttatgttttgttcagaatttgtaattgttactggtagaagaattagttcaatacaggctactcctttaaaacatgaactggaactggataaatgttttgagtcaagacacttgaaattaagcctaaagatgaagaagtaaattaaacaagcactattaatatttatgtgctaatgaatttgtttctgtttggttctttagatattggtaatgtttaatagcatttagcatactagatttgagattctaacttacaacgtgtaaatgagtttggtttaaacttgttattaatgtttaaatctcacttatttgataaacaatagaggaataattaaaggcatttaagactcatcaatttatatttaacttattaaatttgaagtattacttaaagacactggaaggatctctttgttaatgagataattgaaatgcataaaaaagaaatttattatattaaattttaaaattcagtttgaaataaagcatttaattaaatttgtaaatgggaccaaaattaatccaagctccttataagcaattattaaatttctctagatgtataaggagaataagagcatgattaatattttaaattgaactgcagtttttgcatttgtagctttaatttattgaataattaattttaaaccaacattctaaatgagtatttattgacatagattaagtgcatgggtttggagtctctaagacttggttaaaattgctccagatcgcaatttacttaacatctgtcatcctcaattttttagctgtaaaatgggagtaatgataactccctgaaattatatgtctcaataattaataactctaataatggtgataacaatgattaatgatagcatatttttaaggagagttattgaacattgtgtatggtatgattccattttttggtcaaaaaaaaaaaaagatatgcaagcataggtgtaaaaaagtctccaggagtctatctaggtgactttaaaaatttttcaatgtaattctcatttctaattttctaacagtgtatatctattatatctatttgcactcacaagtagatataatagatgtacatctattatatctatgctaatagatgtatgtattcacatataaaaattttagttgtagttaattattttgtggggtgggattatgaataatttttactgtatgttctttaattttattaattttctttgttggacagatatataagtagaacaaacatacatctgaacgtttatttatttatttatttatttatttatttatttatttatttattttgagacagtcttactctgtcacccaggctggagtgcagtggtgtgatctctgctcaccacaacctccacctcccgggttcaagcgattctcctgcctcagcctcctgagtagctgggactacaggcgcctgccaccacgctcagctatttttgtatttttagtaaagaaggggtttcaccatgttgtccaggctctcttgaactcctgagctcaagtgatttgcccacctcagcctcccaaactgctgggattacaggtgtgagccaccgtgcccggcccacctgagcattttaaagtcatgaaagggactttatttatttatttttttacttttaatcccacgtgaagaccctaccgccagggttgagggagaaggaaagaagtcatgctcagtatcgtccatcatcacagccatcaggtggttcagaatccttgtgtggtggtgctcagttgcagcaccttcactgaataaaggacgccctagtacttgccttgaggctgggtgcagactgactccctgtatctgcttccttcctgacagccaacgcgctcttgcttcacactgtaaaggaggtgtatgtctggagagaagtttttaagtaggaaagaactttaactcctttcctcttctttggccatcccctttcactttcaactctctcgtagagattttcattacgcttgaggtctcctgaatcccccctgagaataaatttccaaatctgtctcttaaattccttcctcttcccaggaccccaaccagaatatccaaatatccacctgatgttcccatctcaaatacaacaaatcacacactgagtttcacagcctacaaaccagattttcattctttttttctaataatggttaacaggaccttcagttattatttttatttatttatttattttgagattaaggtcttgctctggtgcccaggctggagcgcagtggtgtgatcttggctcactgcttttattgctatgaagtattttggtaaaaataaataaataaataaatattgtatgggttttaatgatggtaaataaggttttctctaactccacagatgattatgttggcaaaggcatcatggatgattatgttggcaaatgcatggtggtcagggaagacaaaccagcaccctcaaataggtgtttatttcaatcagggcaaattgataagtacaatataacaaaattgctagtgggtggttgactggtcgccctaggaaatggtgttcagtcttggtttttgctattagttgctccaagatagatccataattgcatttgcttgatgtggacacctttaagagcctcctctacaatggatgccctctggtgaacatttgcatgaggcacacatgtccccacactctaggcctatttcatatatccatcctcgtaactcttacccagactttattgtcaccaatcttacaatcttgtttttaccaagttcctaaccaggtggccaaagtgttagccactgcctaaaactcaaggtagatctcttcatttaccaggtcattctccttccatctgcagtggacaaccagatgaattactctcagttctgtctatggggcaatggaagttcctcataagggcacagattgaactgagggaggaccagcactgtagctcaaggtggcagatgtaacttgcatgtgccttccagacctacttgaacctgatctcacagataccacctccatttgataagtttgtttctgcagacaccaaaccttaagacttagaggatcagagaacactcacttcatggtgggaaactcaagccacatagtcactcagccttatggtagagtggatactgtggtactcagctcacatctcccaatctaggattgagaggctgccacagctgagcttcctgtgaaatttctcaaagctcacgggaacagctttgcccgaggttacatggttcccacatctaatacctggttgatatggcaacactggcacctgttccctttcaaggcaggacaactcaatagggacatcccaatttgagttccctttgtgagcagctgaggcctctgttgcaacaatcacagttcaccttcttcctctgtctctcttactctctaatggattgttgctccaaaacgcagtctccaatataccatctgtccatcaaaccccatcttacaattggctttctggagaaacaaccaaatagtcaaatgttcagaatctacaaagtccttgaggtaaaccagggtcttcttctcaaagtaagattagttgtcagctcaggaaggtatagctttgctttaaaatactatgggactatgctagggttctcttattgggacttccctgttccatacagcctttttctttaccacagacctctgagtactgttggatctgttggatcacagtcctgagccccaggcagcatggcctgtgccacacctgggcccactatagaacctgctcttgctttgggctttacctaaagctcagtcttagcaagttacttgttagatgggttggagcttcacacccaatctatagcctctgaaatccaaagaagctcaggaatggtccagatagttcaataaaacacatgtattttacaaatgtgtcttatatactgatgtctactatatggcagtgactctgggagatgcaggaaagaaatgagaaatggttcagcctttgaaggatttggtctagtcagttatgcagcagtgtgagctgtggcgatgacacttggtggacagtgccatatggcgtttatgtatgaagtgccatgagacagcaaggagagagtaatcattcctgccctgccaggctgggtaagagaattgggtgatatctggtcatattaaactgtaagctgatcagctcaataaacaacaaaatatcttatttataccaaatataaaaggtgttaagacatttcataactctgagatttaagctgttcccaagtatgtaatttatatatcagatacagttttttcttggtttggatcctaaaaatggaacagaatgactttctgttcatttataaaaggagaattttttaaaaaccagataatttctgattgctcttcagaacaatgacaatataatcctcaccattgtcaccttctgttcacagcctgtcactgagtagagataaacaactacacacttaattataagttatgtgctaatttgggcacgctaagtataatactattggatgtataatattggcaccaagttttgagagttgagtacagcctttcttttgtcttttattgccaaatcagatgcaagatattcaggacactccagcattaattcctattcactatttctaattatttaaaaactaagatgtcatcttgaaaataaagtagggaaatgttcagctacttgagggaacaatctgtacacaacatcttgtatacacttaggtcaaatacaagactgaataatttatattttcctagtgacagcaaagactattttggactttctttacaaaaaaggaattcttggctgggtgtagtggctcacgcctgtaatcccagcactttgggaggccgaggggggcggatcacgaggtcaggagatcgagaccatcctggctaacacagtgaaaccccgtctctactaaaaacacaaaaataaaattggccgggcgtgttggcgggcgcctgtagtcccagctactcggaaggctgaggcgggagaatggcatgaacctgggaggcggagtttgcagtgagctgagattgagccactgcactccagcttgggggacacagcgagactccgtctcaaaaaaaaaaaggaattcttctgatacctacttcctaaactaacacacacacacacagaaagtgagagagatgtaaatgttttgcttcataatctcatagctaacgtcttaggtttagtgtgtatgtgaagtaatggtggtggctaacaatagtgggtgtaaataatgtatagacatgcactgcataacaaggtgtcagtcaacagcacaccacatcaatgaccatggccccaaaagactataatgcagctgccctatacaggtgtaccatttttttctttcatactgtatatttactgtaccatttctatgtttagaggtgtttagatacacagacaccattgtgttacagttgcctgtggtattcagcacagtcgcgtgccgtacgggtttgtagcctggaaatgatgggttataccacgtagcctaggtgcgtagtgagctagcccatctacgtttgtgtaactacactctatgatgttcacacaacaacaaaatcgccaaataacgcatttctcagaacgtatccccatccttaagcaaggcatcactgtgtctccagtagtcttcttgataagttcaagtcttgttagctgaccttttgacagacctcgttattggatggttgctgtttgtaaccttgcaaataggcaggagatgtgtcaggtttgcccttctcttgttgcgcacttgtgcttgtttttttagtgtcatctttgatccaaggtccctttgaaggtccaattttataacatttgtccatcttgggagggttgcttaggttaacagatgatttagtctgtaaatccatgtaacttactgcctgcaaacttcagtgctttgccatgagctgaaagagaggaaaatctcaagggcaccatcacgttggccactcagagttgtggagccccctttggcccctcagcttcctggggttcccatgaataacacatggttgtcacatgttggggtgagagcactagtgtcaatctgtttactgcaaaattgagcaggggcaaaaatccattcaaactgcaagacagaccagtgggttttaacatgactgcgtactgaaactttattgatatggtttcagattctaccctgcaactaaccttacaaagcggccacaatgatctataaaggctactgaaatattcctcccctctccaattccacgtccgtgtgagcttggattatcttcatatatttctgccaaacagcctttcacagcaaattaaatgccaaagcagatataagaatctggctgtcttctatctggccagacactaagaagatttgtaaagtaatgatttagttttctcactaaaatttttttgtgtcttgagaaatacagtcatttctaataaaatgaatgtttctatgttaaaatggggtccttgttattttaaagcaaataaatatttttaacaatcctcagattaaatttttaatatctatgttattgttagaggtaatcttcataaataaaagctcttaggattttcaataattatgcagacaccaaaaggtggagaaaatgaatgtataacagtgacatcaacaatatggataaattttattaacataataaggattaaaaataagttttggaggactactatgatgtccttttaaaaaatgacttcacttttttagagcagttttaggttcacagtaatattgagaggaaggtacagaaacctttcatattaccctctgccctgacacatacagagcctccactattatcaacgttttccaccagagtggtacatttgttacaactgatgaacttacactggcacatcataattatccaaagtctgtagtttacattagagttcacccctgatgttgtactttctatgtgtttggacgtatgtataatgatagttactcaccattatagtatcatacagagtagtttcagtcccctaaaaattctctgtgctctgtctattcatcaccctacctcaggctctggcaacccctgatctttttactgtctctacaattttgctttttccagaatgtcatatagctggaatcatgcagtatgtacccctttcagaccagctcctttcacttagttatatgccttgaagattcctccatggcttaatagtgcatttcttttcagtgctgaatagtatttcattgtctggatgtaccatagtttattcattcatctactgagaacatcttgattgcttccaagttttggcagttatgaatgaagctgctataaacattggtgtgcaggtttttgtgtagacataagtttttaacacctttgggtaaataccaaggagcatagctgctggatcctatgataggagtatgtttagttctgtaagaaactgctacactgtcttccaaagtggctgtaccaggctggagtgcagtggtgccatctcggctcactgcaaccttcgcctccccggttcatgtgattctcatgccttagcctctcgagtagctgggagtacgggtgcgtgccaccatgcccagctaacttttttttctttttttgtggtggagaaagggagtttcaccacatttgccaggctggtctcaaactcctggcctcaggtgatccgcccatctcggcctcccatagtgctaggattacaggcatgagccactgtgcctggccaatggtatcttgttgttgttctaatttgcatttccttgatgacatatgatgtgggcatcttttcatatgtttacttgtcatctgtatatcttctttggtgaggtgtctgtcaaggtctttggcccattttttaaaaaattgagaaaaattgtatttataatatacaacatattttgacaatgtatacatttggaatggttaaatccagctaattagcatatatgcattacctcacatacttggccgtgtatatagtcaatttttgtaaatattctgtatgtgatgtgaaggatgtgtgctttgcagattgttgtcgcaggtctgtaagcgtgcattacatcaagtgagttactgatgtgttcgaatctctatcccttattggttttttttgtttgtcccattagtgagatgagtatattaaaatcttccattgttgctaggatttgtctgtttatctttgtagttttctgttcacatttgctttacacattagaagaccacattattaatgcagcttgccatctcagtaaacaggaagcccctactcggcctgatgacatgcctgtaacccaggtgtcatgaagctttccctttaatttccctttataattctgcttatcttactttataaaagaaaggcgtctcacttacccatttaacttcttactatgtctctgcctctggagcaccaaagaaaggtacactgacgtgttcattaatgggaatcaaggcaccataaactgaaggcatggcttttcatcgtctagacatctaggtgttaagggcacagcatggcattagatcatcatgggatttttgagatatatctcagaagaaaattttaaaaagttgaatgacattgcataacaaaattccttccatttctactcactgatatatatatataaacatatatatttttgataaacatatatacatatatacttatttatttagttatttatttttgagatggagtttcactcctgttgcctaggtgagagtgcaatggtgcgatctcagctcactgccacctccgcctcctgggttcaagtgattctcctgcctcagcctcccaagtagctgggattacaggcatgcactaccatgcctggctaattttgtattttcagtagagacggggtttcaccatgttggccaggctggtttcgaactcctgacctcaggtgctctgcccgcctcggcctcccaaaatgctgggattacaggcatgagccaccatgcccagttggtaaacacattttctaagtattaatatatacagaaataaaaattggaatgggatttattctgaaccctgtctcattttaataatcagtgatattttccgtacatatatgaactaactgaaaaacaaaagcctatttcattaaggaatatgtgtataatttaatacaatttaaacgtgatatagttaatgtaattcaacattttatacctaataaaaaatttataacttgatgttttgtttaattttatacagatgatacttgcaatgataactcaatctggattttttttaatgtttagaatcatatgaaattttaaaattaaaataaatttcccatattttagttatacataaggataatatggtaatcaatttaaaaaactttgaaacataaagatatatttttatgtaaaattttgaattgaaggaggaaaaaagatgtaacatttttgactgttaaggataagctagctcatgtatgttttaaatagataatggaaatcaaattacatagcaattattttccattgtatctatttgttcatttttattttttaaatttatttttacatggagtttcactctgtcccccaggctggagtgcagtggtgcaatctcagttcactgcaacctctgcctcctggtttcaagtgattttcctgcctcagcctcccaagtagctgggactacaggcatatgccactatgcctagttaatttttgtatttttagtagaggcggggttttgccatgttggccaggctggtctcgaactcctgagctcaggtgatccgcccaccttggcctcccaaagtgctgggattacaggcatgagccaccatgcccggccccattgtgtatatttaaaagaacattatgaaagttttctttaaaaatgtcaactcccatgacagacaacaaacaatttagaacgaaaaattttagagggcaactgctataatgtgtgaaattcttgtggggtatattcgagaaggacaatgtgaagaccccacctcctgcttttgggcaatcacgtgtccagccagacactagatgaactacgaatttcctgagaagaaatttcctctcttggtaagtgtttcagtatccagaacacttaaccatcttggaattcttcctaatactcacctttatatctaggggaaggtaaagaagtggggcccccccacacagcagtgagtgccagagctggaagtattcagaagatagaatggtggaccatgctccctttcagagccagcaactgataacccatctcattctggttggaaagaataaggaaagaagaaaggatagacagaaacacaggtagacatacctatttatgaagtgccttctgtgttcagggatctgaacagctgcgtgcatgtatgttatttgattttcataacactgcctcctacagatgaagaaatggagcctcaggaagatgacacggcttgtccaagtttatacggtttgtcagtggtgcagttgggatcccaggtttgtctgacttggctataaccaccgccttagagtcggaagatatgtgtgccctggggcaaattacttaacttctctgagctcaggtttcctcatctgtaaaatggggcattactagctattttgcagggtggtagttaaaagctagcgagttaatgtgtggatgtactcaaattcctagcaccgggcctggtgcacagaaggccctgaagttagaagagttgactattcaggcacagagtcgggtattctggcaccaaacttctgccagcaaagtgatcgctggtgtttggggcacaaagctttgggagtagagctgtcacttaatggtgacaaagtgagtagtggctcacgttaaattttaagataaagcacctaaaactttggacattgacttggggttgccttaagagatccaaggctagtgcccatccactgcattccctcctagccaagaatgtctcgcccttcgcatgttaaaactaaacaatgtagcccgcggagcccattcaatgctctgcagtcaaggattaaaaactcatgctgcctagtaatcccagcactgtgggaggcggaggcgggcggactgagcttgaggtcaggagtccagaccagcccggccaacacggtgaaacctcgtctctgctaatacaaaaattagccgggcgtggtgttgtgcgcctgtagtattggctactcgggaggctgaggcaggagagtcgcttgaacccgggagggggatgttgcagtgagccgagatcgcgccactacactccagcctgggggacagagcgagactctgtaacaaaaagacaaacaaaccaatccaaactcatgctgcctcgcccttgcggggcagaacctacaaaagtcaccatgcctctgatgttcattttcactttttttatgttacgaagcaggatcgtgtgtgtgtgtgtgtgtgtgtgtgtgtgtaaacggatccagatctaaaattgtcactgaaaggacgaactcatcaaagaagtccatgtgtagctgcaagtagctttctggaactattggtgttgtttgcgcgccccctggcggccaatggccttccttgtcaaggaggttggcacagatcatcagtttcttaaccgtggtggcacgtgaggaattacctggaaattctgatttaaaagctctactgatagctcacgcctgtaatctcagcactttgggaggcagaagcgggcggatcacctgaggtcaggggttcgaaaccagcctggccaacatggtgaaaccccgtctctacccaaaatacaaaaattagccgggcttagtggtgcacgcgtgttatcccagctactctagaggctgaggcaggagaatcgcttgaacccgggaggcgtaggttgcagtgagccgagaccttgcggttgcattccagcctgggcaataatagtgaaaccccgtcttaaaaaaaaaaaaaaaagtctactgctgggatagacattagtattatttttttaaaagaaatttcacaggtgatttaatgtgcagacagggataaccactgctagggggatttcatttatttatttatttatttgaaatggagtttggcacttgttgcccaggttagagtgcaatagcaccatctcggctcactgcaacctccgcctcccaggttcaagcgattctcctgcctcagccttccaagtaactgggattacagggatgcgctaccatgcctggctaattttgtatttttagtagagacggggtttcaccatgttggccaggctggtctcagactcctgacctcaggtgatccacccaccctggcttcccaaagtgctggggttacagctgtgagccaccatgcccggccctggggatttcatttagagttacaaattgatgggtttgattcattttgcaaatatttattgagctcctactaggtgttaagcactgtgataggagatgatgagcaacagaaagaccagtgccctgtcctcatgtaaattacaaatattagtgaaataaacatacaatgaaaaaataatcattagagctcagaataggacaatctgagtgcatctggaagtcagcaaacgcttgaggacttgccttttgaagtgaggtctgaagagtgagctggagttaactaggccaggctgatgcactgacacagctagttgcctcaagtctccttgctcttgtcaggcaagtggcccacgaagttggaggtaggccttcttttatatggctctggcctcctgcccaagtggacaatcggatccctggatgactgacgatgattgcctgttaattccatcagggtaatgtgaaaacattaaaaggaggaaagtgttgctcctgagggcagcaaaagatgtgtgcgtgaaggtcgaggaggaagacaagatggagcgctgaacatcaaagaaatgcaactttaaacaaaaaggagccatgtctcgtcaggccaattggcaaaggcgtataatacatagtgcttgatgagaatggagattcttctctctgatccagcaaattcactgttaggaagtccccctggagaatgatgggcatagataagtggagagtctagcagagaaagggagtatggctgagcttaaagaacaggatcataacccctttgggaggagaggtttgttttaaagaggaagagtaagtattgtgtgggacgttgtctcagtggctgaattaccattgatcgctccatgtgggattacataaaagaagattcatgtgtagaaaaatttccatataacaacctctcttatccttttaatttcaactgaatttgacatacctattgagtacctgctgttgcaaggcttaggtgggtgtgaagaactgcattatcatgagggatgggtgacatgcctggctccctgtcctccaggaatgtaggctagaggcgaaggctgacaagcgacaaattgaaatgcagtaattataataaaataaatattatattataggtataagaatgtgtgtttaaagtgttatgagaagagaggtaaaacatttttcaaattgtaattgaagaaacgagtctgaggaagattcccagaggaaataacatttgaacaaaattttgaagaaacaattggatttcactagatttggcataggagtattggaggggagaaggcccttctgctttaaggagagttgcatgaggctttatttatttaataaggctttactgagcacattgataaatgctgtgtgggatacagaaggaagagaactttctaccttggaaaggagacaaaacacaccacaagcagaacaaaagccatgatattacattatattgtgtaattaggtgtcaatgttgtcagcaagatctagagatgaggccattgcttcaaatatttgcagcgcagtggacagaagcctgctgagggcaaagggagaaatgggaggtacattcttaccatcacctttccacaaacttctggattaaaaaatattattgtttcttttgacaattttttatttcaatagtttttggagtataggtgttttttggttatgtggataggttctttcatggtgaattctgaggttttagtgcacccatcacccgagcagtgtacactgtacccaatatgtagtcttttgtccctcacccccctcccaaccttcctcctgcatccccaaagtccatatatcattcttataccattgcatcctcacagcttagctcccacatataagtgaaaacatatgatatttggttttcaatttctgagtttaaaaagtattattgtttcttaatgtgacatgaaccatacccgaaaacactttggcaaaaaactcaagcataaaggggggaaaaaaaagcctccctcaccaccccaactcccccgtaatcccgcatgtctcctgagatgtaactgttatcgccactttggtgtggattctcccagaatgttatcgatgtatttatacataaatacaaatatgtaaatacataaacatatagtttttgggttgctgtgtgttttatataaatggtaaattcggaacattttctatagcttttttttcactccaaggtatttggggaactttacatgtcagttcatttagatatacctcagtattttaaacttgtattccatggcatggtgcatctcagtcactgaactatttccagttgataatatgggcagttgataaaatttatacttgatttgtgcatcagcaacaataataacatccagcctgggtttagtaaatggagccctgtcttgaggcaccagtctagggtaacagttccactgctgattccatgatcttggtcagttcccaaaccagaatgaaagggaagctggggagcctcagagaagaacccagcacgacaaacagctgagagttgtactgcaagcctcccactaatgactggttgtcattgatcaagtaactatatgctaataaaaggaaaataccaagagcttgaaagctactctggcccatttgtgaaggtgggggctctcagcaggcaggggaataaatggtgttttgatttgactctatctcatagtaggctcattgtgacaaggactctaaggacatttgaagatatttggggtggggaagggaggtctaaaagtgctttgtattgctaaaagttaaagacataaagattaaaacaagatagctgattggcaagtaatacgttgtttatgggatgaagatctacattttccttttgacccagcaatcctacttttaggaattatctcatagaattactctcatagatatatagagacaggagcagagaacgagagagctggtaaactctattttacttaagccatggaattaaggaacacctggggtaagatattttgaatttatctggtgattatttcccaagttcctgagtgtacagttaaaattgatatacttagaaactggcagaattttcacactcaatcccctctacggagtgagagctgttattattggaagaaccaagacattcccccttcccctgcttttttaaaaactaaattaaagagtaatattgcattgttgggggaaacacagtggttagcactactatccaaaacttgaaagatgcagaagtgatgatttctctcttttttgagatggagtctcgctttgttgccaaggatggagtgcaatggtgcaatctcacctcactgcaacctctgcctcccaggttcaagcgatcctcctgcctcagcctcccaagtagctgggattacaggcgcccaccaccatacccagctaatttttgtatttttagtagagacagtgtttcaccatgtcggctaggctggtctccaactcctgacctcaggtgatccgcccgccttggcctcccaaagtgctgggattacaggcgtgagccaccgcgcccggccagaagtgatgatttctatcacatctgcaatttaagtgacaatatggctgatgcagtatatagaataactcagagaatgaaatgacaatgactttaattgcatctgcttttacagacattgtctccttcatagcccgtgttatgtcattatcagtttggcgaatgcttttttctccatcccaataagcagtaacaccagaaacagtttgctttcacatggcaggggctgcagaatactttcaacatcttgcctcagacttataccagctctaaggtcctgcgcttcagttttgtacttaggaatcttgatcatatcactaacccacaggacacagccctggccctccacaaggatgctattttgctaagaaggcctgatgagaaggaggggggcaggtgccctggctgactttgttaagacacacacacgctgagggtgggaaatacgcagtattccatgctttcactttccgaggttttagttactcacggtatagtaaaataagatattttaggggtacaaaaaataattggaacgaataagatctagtatttgctagtataacagagtgactatagtaaaaaataattgtacattttaaaataactaaaagagtgtaattggtttgcaacacaaaagataaatgtttgagatgaaggtaaataattgcatttaacctgatgcgattattatacattgcatgtattaaaatatctcacgcaccccgtaaatatatactcctactgtgtacccaaaaaattaaaaataaattaaaaaatttaaaaaaggactgcgcatggtggctcatgcctgtaatcccagcactttgggaggccgaggcgggtggagcacctgaggtcaggactcaagaccagcctggtcgacatggagaaaccctgtctctcctaaaaatacaaaaataagccgggcatggtggcagttgcctgtaatccaagctacttgggaggctgaggcagggagaattgcttgaacccaggaggcacaagttgcagtgagccaagatcataccactgtactccagcctgggtgacagagtgaggctccgtctcaaaataaataaataaataaataaaaattaaaaaaagatattttgggagagagatcacatttatatgccttttattacagaatattgttataattgtttcattttactattagttactgttgttaatctcttactgtgcctaagttataagttaaactttatcataggtatgtgtgaatagcaaaaacatagaatatatggggtttggtactatccatggtttcaggcatgtactgggggtcttggaacacaccccctgtggataaggggggactactgtactcaggttaattttattcaagtgagaaaaaatggttcaactgtaagtatattctcagggtgttttgatgacatccatacagaaggataagtctccctcatgaaacgttaatgaaaaggctcatgggaccctacttctccaacatctggtgtctttgggggaagaacagggccatagaaagctttgggtgtagactctaaagactgaggttgcaacctcagaatttcaaaatagtttagtatcagacaacctgacattcctatccatgttttagccatcgtgtaccataaaacgatttgaccctcttcgacgtccatccatcatgtgccagccagccacagggtgagttttgttgaccctcacaagtgccacaattcactaaggtgtacagaagccatgtagtggagtagcgctgaagttggagtctcaaatttgtactctcttggatggtaaatatacatcttcaggcacatttaaaaaacaacatgttgttatttagaagttgttaaaaaataacatcgaaggccatagcatggtgtgggaccgtcccctttccaaaagaatccattaaaaccctatcaattcatgtatccatgtatcccattcagcccttttgagcagaggcagacagcttattttacgtagtataaagattagggagggtgatctaggagctaaaatatggagagagtccttccttagacagagtggtagaatttggtattgggaaatttctgaactgataatccaatcaaaatcagatgcattggtggggtgctgtggctcacgcctataatcccagcacgttgggaggccgaggcgggtggatcacgaggtcaggagttcaagaccagcctggccaacatggtgaaaccccgtctctaccaaaaatacaaaaaaaaaaattagctgagcatggtggcacatgcctgtgatcccagctactcgggaggccgaggcaggagaattgcttgaaccaggacccaggaggctgaggttgcagtgagccgagatcgtgccactgcactccagcctgggctacagagggagactcagcctcaaaaacaaaaacaaacaaacaaacaaaaaaaacaaaaaaacaaatgcattatagttctgttttcagaggcagcccagcttcacccattttgacgatgcatttttctatgtggtatagaaaattaaagaaggcttctctggatgccgttctaattgtaccaagtttgaatcaatcactttgtaagttgaagtattcaaaaagcttatataaccaactacatgctcaccatttaaacatttttttacaacatatattagaaaataccctccctccaatattttacaaatagaacttatgtttgcagtttctttctaaggtaattgtaaaatctgactttgattatttcacatattaaaaatgatataaaggcttatatcatagatttaaaggctgagtggtttactctgtgttactcagctcagcactgctaaggctgccactgtcaggtacgttgtgccacctgatgtgaggccgaatgaagcacatggcactgcacttgcagtatccttccctaaaagagaaaaacagtaaatctaatcaaccaggagaatcaaacatcatggtgaacagcatcacagaaatacagtcagcctcatggtacccgtatgtcaaaagatatcaccacttttcagattactggtatacatgactgaactggttccagaaagttaaaaatgtatgtactcaccatagtgagcagaaattcatcttactgcagaattgcttattaaaatcaattttaagtaatgtgcactatttgaatttggcaaaatgatatttgtattgcatgaatttgcaaacaattgaggttaaatgtatttttttgcctattagttatttttgtttttttctttttcttttttttttttttgagatggagtctctcactctgtcagccaggttggagtgcagtggtggatctcagctcactgcaacttccacctcccaggttcaagtgattctcctacctcagcctccctagtagctgggattacaggtgcccaccaccacactactcctgacctcaggtgatctgcccaccttgacctcccaaagtgctgggattacaggcttgagccacctcacccagcactttttaaaaataattatctattgatattttttccccattgatttgtttggacctttagggcttttttgttatatatatgagattttcacttagtaaagatttttacacatttatcataattgttgcaattttttccaatgtaattaaatctactgctactttccttttcctttgaggttttttttttttttttttttttttttttgagacaagggctcactctgtcacccaggctggagagcagtggtgcaatctcagctccctatggcctcaacatcctgggctcaagtgatcctctcacctcagcctcctgagtagctgagactacaggtgcatgctaccacacctgactaattaaatatcttttttttttttttttttttgtagagactgaattttgccatgttgcccaggctggtctcgaactcctgggctcaagctgttctcttgcctaggcctcccaaagtgtttgtactaaaggcatgagccagtgcacccagcagaatttctaaaattgctctttaacttaggaaattaattattccccattgagggagggagattctgtttggtgaatagaacctgatagatatgcaactttattttctctatttatggactgacatttacatattaactatttgatctacctaggcgtttctggtataagataggaaaagataatttaacttatattttccccaaataaaaaattcttggcttgaacaccatattgaataattcctactttcttatggctattggcaagtgaagttattatgtcatcaattccttctttattgctgatctaggaagaccaattctctcaaaacttgaattactttggtctagatgtattctgctaaattttgttatttttttttaggtaaaaatggaagctagctttttcctccctatgttactgagtgacaaataatggatcatcatttgcagtttacattagtgaatattttccctgtttatattttgtaaactgatatcatttgattttcactaatagcaataaattttgatttcagtttgcatgcactcatctaaaaattggaaagccaatttcttcaattactgtaagtaaaatcctgactgattctaaatttaaaatatattcctaaaggggaagtacaaaattaagaaaaaaaatcaactcacaaaacagagaaaataataacagtcaacaagttgattagactaatagaccacaaagacataaagaggaggtgagttttgtcatgggagaaagggaagaagaggacctcccccgacccgacccccgaggacagtgccaaaatgggttgcccagacattccagagaaaattgcgaaatccagcaggaatccagccaggctagattctggtcttctgctggaatgtgtcatttaatatatataaaacccggtggtgaaacattggctgcctctagatacactgctgggtttaaatatattaaatgatgccaaagaaagaatacatgccaagtttctacgagccttacacagtcattcctgcatgtcaaaattgggcaagtaactaggaggccagaggtgctagaactgagtaggaaaataatctgaagacagcagagccatgctagcaatgaaattattaatacattattaaaacattctacttttcacaatctaacactgtaaattccttcttctacaaattagtaaacaaataagccaaattgttcaagctaagttgtacaaccttttcaaaggcaatagtagaaaatgttcacaaactattcattgagggcccacagtgagctacatcagaatgtgttaaattaaatatgcaccttagtttactgtgctttagtaataaagataaaggatctgtattgacattatgttttatgtttcttccctatgggggagaaaaaccaaacacaaaatttgtccttgaaagcagagagtagtgacatgtgtttcatgatactggtatcatttatcactaaaaagtggagccaggctgggaggaagggtttggaacaaactatgcatgcactggacacatgaaacaactgcagctgttatcatcactagccgcataaaggaccactctgtgacaatgcctaaggcctatatatatgtcggaccaataaagaatgggccatacagatgtgcaatatcagtacagaatgttcaagtacttgctgtggatctctccctatccactgcagttaactctccagattattccctgtgtgggtcatacctcatccatgagcctccagggatggagcactaacctctgaatattcctgcttttggtgtagctcccaacaggctcttctaggtactcactgaataactttccagaggggcttcacagtttatagaggagctatttggaaagtctcacaggcattaatttaatttgtgcctcgcgggggtcggggaagacaacatttgggaaaaacatggctacttttgcacaaaataaatttttgcatatgggagagattttgcctcttaaacaatatgttcttttctccaaagttgcagctaaacttctagacgcaaatttttcagatcttgaattacacttgaaaaatgaggaagaacagatagtgaaagataattttacggttgtggaaagtactgacatctgagtcggaagaacagagtttaaggttcaactcagtcaatttctaactgtgtgatcttgggcaaattgtttggcataaacaaaagatataaacaaatatattctaacagtgaatgtgaaagcaaatacatacaactgttaggttttcttattatcacatcccccctcagatttgagattagatcaatactttacaaaaagctgccttaaaatcagaaaatgagccaggtgcagtggtgtacacctgtaatcccagcactttaggaggctgaggtggaaggatcgcttgagcccaagagttcaaggctaacctgggcaacataatgagaccctatctctaaaaaaaaaaaaataagctgggcatggtggtgttcgcccgtggtcctcgatacttgggagactgaggtgggaggattgcttgagcctgggaggtcgaggctgcagtgagctgtgatcatgccactgcactccagcctaggccacaaagccagaccctgtctctaaaaacaaataaaataaaatttaaaaatcaaatcaaatcaaaccagaaaatgggtaatggaaatattaggcagatagcattgtttatttagtaactttcttttgtccatgacacaaatagcccaaaagactcagacgagccacagcagcctgcttagggtaaagaggaaagaaaaggggagaagaggtggccctggagactcatttccttctttttccatggctcagcttccatggctccttagggctgagtttgctgatggaagaacaggctccagaggttgcttcttcagggagcccccctttctaacaaggcctcttcctcagcctagcaacttctgcagttacaaaggaacatagtgttacctgttgctttgacctctaagtatagagtgttatgagggtggggtccctcgccactcggatgctagccacagcatgcccagacctatctctgggtgggataatgagagctcaggtgaccaggtgcctctgatacttctctacctatacaaattttccaataaactattttatatcggtattgtatggtgctaaaggtgtaggtccatgccctaaattacattctggaagattttcacccctagtgaatattgtcagggtaggctagagtaaggagagttgagggtctggggccccataccccaataaccagtggggtgaccttgggcagggtgcttcacctcctgggcctagtttcctcctctatgagagatactcttaaagacttttctcttttttgttgtttatttttatctctgacttttctaattctttagcacatcaggtgcttctatttcgactacggttaatatgtgcggtgtaagggacatttctcacccaaccagaataccacattagccagaaccgcctcactcctggcagtgggaaacatgcagcttgctagacatggaaaagttactgcagccaacatgtacattgtttgttttgctttatcatggaaaaatgtaaatatgcaaaacataggatggtatgatgtagtgctattcaaagtgtggtttgtagatcgctgcccatccatgaggagataagtacagaattgaaagtgagggagaaggaggtggggtgggctctgggttgcccttccagcctcggttttaggttggtcccgtgggcctgggtttgggaggggggtcgtgctgtctcaacattcctgcccctccctctcatggcagccaaacgctgcatttgttggtcttgggtgggagagagttccccactcttccctcgtggagctaacctatgttggtgttggtgtcgggtcctgaacccaagaccatttcctgcccctctcccaagggttttttcctcccccagtgacagtaggtctgtgcctgtgccttgaggacaacaggctttgctgcctctacccaataaccaaaggcactttctttctaggccaggactggagaagcagaagcggctgtcacctcctgcaacctgcgcccccaggggctttcccactgcaagccctgccttcatctccatcttgccccgccctcaccccgccccgtctctcttctgaacactcggtgggaacctgggaaaaagagcttttgggggattgccatctctccttgtgtctattccacactcggtctttattaaaatttttgctgattcttctcgccctcttgtatgacagccgcttcctcctccggtgctcagcctccggggagaccttgtgtgtccctccctcctaggtggcaccctgtccctctccggaactcaggctacttggttgacttgcaacttcagccctctgacaggctcaaggaaagttacgattttgtagtttatctagctttcccacagtttagacacatttccagctttctatagcctaagtagaggaggaaaaaaacgatttgttttgtatacaaatttaaaaatgactatcctgagtttgctgaaatttctttaaaaatttgttcttccatctccatcaatatacctcaaggacactgggttcttaaaatgagtgctactaaaaacaaaacatagaaacagtttagatatgctatattgccctctgtgaacagtggcatcgctaattccacctggcttggataaggttatacacaagaatgacctcacttctcacattaaaaactttaaataatttattgacacacacagtgttcatcaaaagcgtttttatagatgtttaatgtgaagacttcctatttcataaattttgtatagctacagtgatgaaatgacaaagttatgagtgtaaaaatgattcttttttttgggtcggggaggggaacagagtctctgtcgcccaggctggagtgcagttgtgtgatcttggctcaccgcaaccttggcctcccgggttcaagcaattctcctgtctcagcctctcaagtagctgggactacaggtgcacgccaccacacctggctaatttctgtattttcagtagagacagggtttcaccatatttgtcaagctgatctcaaactcctgacctcaggtgatccacctgcctcagcctcccaaagtgctgggattacaagtgtgagccaccacgcccagctgaaaatgattctttatattattacatgattgcatatatctatgtcacattttaaataaacagagtataatttttataactttattttcccatttgttgcttgttctgactatatgtattaaaaatacctatgttgagtctaataataaaattggagattatgttgttgcatgtcttttttttttcttttttttgagacggagtttcgctcttgttgtccaggctggagtgcaatcgtgagatctcagcttaccgcaacctccgcctcccggttcaagcgattctcctgcctcaacctcctgagtagctgggattacaggcatgcaccaccacgcccagctaattttgaatttttagtagagacggggtttcttcatgttggtcaggctggtctcgaactcctgcctcaggtgatccactcgccttggcttcccaaagtgctgggattacaggtgcgagccaccacacccggccggccctcttttcctttctttttacaaattaactgtttatattataacagttttagatttacagaaaagttgcaaagatagtacagaaagctgctatagaccctattcccggtttctcctattatgaacatcttaggttagtatggtacgtttgttacaattaatgaaccactattgatactttattattaactactttggaaaatttattcatatttccttagttttaccctagcgtcctttttctgttccaggatcccattcaggataccatattacatgagtcttcatatgtctccttgggcttctttggaccgtaacaggtgcttggactttcctggtttttggtgtccttgccagttttaaggtgtactggtcaggcatttatttatgtatttgtttatatttatatatattttttagagattgagtcttactctgttgcccaggctggagtgcagtggtgtgatcatagctgtctgcagcctcgaactcctgggctcaaggcattctcccacctcagcctaaagaattggattttttagaaaatataggcctattcagattgccaaaactcacacacaaaaaaataggcaaattatatttcaaggaactggttaatttcatctaggttatcaaatctgtgagcatacagttgttcagagtattcatttattatgattaaataataatgctcatatttaatgtccataggctctagtgattgatgtcttctgtttctgatattagtaatttgtgtcttgtctctttttttcttagcctggctagaggattatcaattttccttcactctgacaatctctgtcttttagttgttgtatttagactactgatgttcaaggtggttgatcttttcaaagaactagcttttggttttgttaatgttctctttcgattttccatttttaatttcattgatttctgctctaagccttattttcttttcttctgcttactttggatttaatttgctcttctttcctagtttcctaaggtagaaacttagattattgattctaggtctttcctctgctctaagatacaaattcaaagttaaaaatttccctctaagcacggcttttactgcatcccactaattttgataaattgcattttcatttttatttagttcaaaatatttttaaattgatcataaaatttcttcgacacatgtgttatttagaaatgtgttgttcaatctccacagactttgggattttccagttgtccttttgttactgatgtctaatataatttcattgtggtctgagagcagatcctgcatggtttctgttcttctacacttgttaggttgtgttatatggtccagaatgtggtttatcttggtcagtgttccatgtgagcttgagaagaatgtgtatttgtgctattgttggatgaagtagtctatagatatcaattatatctagttgattgttgttaagttcaactatgtctttactgatattttgcatgctgggtctgtctgtttctgagagagaactgttggagtttccaactatagtagtggattcctgtatttctccttgcagttctatcagtttttgccttatgtagtttgatagtttgttgttaggcttatacatgttaaggattgttatgtcttcttggagaatttacccctctatcattatgtaatattatccttcttaattcctgatatctttccttgctttgaggtctgctctgtctgaaatagagctgctcctgctttcttttgatttgtgttagcatggtatattttctctatccatctacttttaatctacatgtgtctttatatttaaagtggtcttaatgtagataacatatagttaggttttgtttcttgatccactctgacaattggctcttttaatcggtacatttaaatcattgatgttcaaagtgatttttgatataactggatcaatatctaccatatttgttaccgttttttatttgttgcccttattctttaattctatttttgacttccactttttttctgtcttttggggttttaactagaattttaggtatttattttttttgagacagggtcttcctctgttacccagcctggagtgcagtagagtgatctcagctcactgcaatctctgcctccccagctcaaatgatcctccccactgagcctcctgagtagctggaaccacaggtgcatgtcaccacacccggctaatttttgtattttttgtagagacagggttttgccatgatgtctaggctggtctggaactcctgagctcaagtgagcctcccgctttggcctcccaaagtgttgggattacaggcatgagccactgtgcctggcctagttgaccattttatatgattccattttcccttcttaacatatcagtgatacttctttttttactttttaaagtgattgtcctagattttgcaatattcacttataacgaatccaagtccactttcagattactatatcatttcacaagtggtgtgggtatcttctaatgacaaaataatcccaattcctccctcatgtcctttttaacatttctgtcattcattttatttatgtttaagcatatatatacacacacacatacacataagtacaaccaagtatatacacacataagtgttcataatcaaatgcattgttgcttttattttgaacaaattgttatttgttagatcaattaagaagaaaaacatagcagtttttattttatcttcactcattccttcttcaatgggtactctccctttctttatagaaattgaagtttctgacatatttttcttctctctaagtaacttcacatttcttgcaaggtaaaacttccctcaatttttgttgtttgagaaagcctttatttctctcagttttgaaggataattttgcagggtacagaatttttgctcaacacttcaaacagttccttccacttgcttcttgcttgtttttttttttcttttttttttttttttgagatggagtcttgctctgttgcccaggctggagtgcagtgatgtgatcccggctcactgcaacctccgcctcaagcgttccagcgattctcctgcctcagcctcctgagtagctgggattacaggtgcacaccaccatgcccagctaattttctatttttaatagagatgggattttgccatgttggccagcctggtttcaaactcctgacctcaggtgatccgctcgccttggcctcccaaagtgctgggattacaggtgtgagccactgcgcctggcccccacttgcttggtttctaagcagaagttggatggacgcaattcttctttgttcctctataggtaatatgtttttcctttagaacttttatctttgattttctgtagtttgaaaatgatatgcctacgtatacctttcttttcttttgcatttatcctgcttagtgttctctgagcttcctggatctgtgatttggtgtctgatattaatttggaggaaattctcagtcattattgtttcaaatacttcttctgttcctttctctcttctggcatttttattttgtgcatgttacaccctttgtagttgtcccacggttcttgaatattctgttttatttttttcagtttttgttctcttttcctttcagtttttaaaggtttctattgagatattctcaagctcagggattctttcctcagctgtgtcaggtctaataagctcatcaaaggaattcttcatttctattagaatgtttttgatctctagcatttctttttggttctttcttgggattttcgtctctctgcttacatcacccatctgttcctgcatgctgtctacttcacccattacagcccctggcatattaattgtagctcttttaaattcctggtctgatcatttcaacgtccctgccatgtctggttctgatgcttgctctgtctattcaaattatgtttcttgcctgttggtatgccttgtaatatttttcttgataggcagacatgatgcactgggtaaaaggaactgctgtaaataggctttagtgatatgatggtgaggtgtaggggacgggaaatgttctgtagtcccatcaacaggtctccgtcttttagtgagcctgtgcctctggactatgaacatcacatgtgtttctcagcttttttcctcccacttaggtgaaataggatggctagagggagcccgagttggatatttctctctaccagttaggttgggctctgataataccccagcaggttgggctctggttaacttcttactcctgaagggtagacattgttaaaaagtacatagtgccccagggtattttcaaatggttcctttccacctcttcctgctggaagcatgagggggttttctctgatatttactgtgggaatggtggttgagctcctgaagataaacatcacaagactgtgggggcccttctatgagtgggtccccctggagttcttaactgttaggcttgtccacactgagcctctggccaatttgtcaatgaacagttcaggttctcctacccaacactgcttcccttggttgtttctgcccatgagtctgctctggtaagttgtggctccctgtatttatctgtctttcccatctcggggcagcatttgcccgtgtcctcacctctcttatggatccaagagcagttgtccatcagtctgttcagcttttttcttgttaggatggagtggcaacttccaagttccgtacatgtgcaaccagaaacaagaagtctatcgagactttatatctttacatctttaaatattttaacattatctctaaaaaacaagcacagtttaaagctaatggcaatactgctgtcatactcaaaattaaaaaattccttaatattgccgggcttggtggctcacgtctgtaatcccagcactttgggaggccgaggcgggtggatcatgaggtcaggaaatcgagaccatcctggctaacacggtgaaaccctgtctcttttaaaaatacaaaaaattagccacgcgtggtggcaggtgcctgtggtcccagctactcgggaggctgaggcaggagaatggcgtgaacccgggaggtggagcttgcagtgagccaagattgcgccactgcactccagcccgggcgacaaagcgagactccgtctcaaaaaaaaaaaaaaaaaaaaaaaaaaaaattccttaatatcatcaaattcccagtcaatgttcaaatttataattgcttcaaatgtcattatcttacagtttacttgaatcaggatccaaataaggtctctatattgccattagttgaaacaactctactaacttaaatgtctatgctctatctctcttttttttttttttttttgatggagtctcactctgtcacccaggctggagtgcagtggtgctatctgggctcactgcaacctctgcctcccaggttcaagcgattctccccgcctcagcctctcaggtagctgagattacaggtgcacaccaccatgcccagctaattttgtattttttgtagagattgggtttcaccatgttagctaggctggtctcgaactcccgaccccaggtgatctgcccgcatcggtctcccaaagtgctgggatttcaggcgtgagccactgcacccggcctattctctttctttcatgtgagaatcccagttctcatgacactggggtggtagaattagaagatcatacaactactcatttgctgtattctacagtgtgcatgtgcgtgcacacacacacacacacacgcacacgcacacacaatgtttcagagtaacaataccaacactacaccaataataagattatagaaaagagtttatgatttttgggggtagttttccttatacattaaggatattttatagggatgaatagtcaaatcaattttgtttaaagtcacttggagttagttactatctgtttgattatgggaccaacttgctacctatttaggttacatgcagtttgaatattcaccagtaaacctaggaataattatcactgttcagaaaatcaccaatagttaccgagcacctccgaggtactagaaatgttcatgatcattgttacactcaagtcttgcaaagccctatgaaatagaagttacttttcccttataatttaggaaacaaactcaaagaggttaaaagcttacagtgaatcagtctcacagctagtaagaagaatgagtgaggtaagattgaaattccagtctctggagtccatattctgcccttagaaagattaggatgatttatgatagcttatagaaaaagctgctggttctatttattttattacctctatatattccagtagggagacaaggtggtaactgataactgtgttatacctgattacaaaggtgataatttttttcttacagatttatgctcagaaacagtgcacctgacagtgttagctggttttctctaacttctttttctggggcaattctcccaatgggtttgaatttttatgagcttactgatgggcttaaaagggtggccttcaatatttccttccattcagggcctattgtgtcctgggcttcaaattcacagaggcccttaaatttagaatttggaccttacatccatcccaaagaggttctatctgtgatcacagagataaaccaacaaggacagaagaaagagatgtgcaacttacagcttcagcgttggatcccattagtggaaggcactgctggtaggtagaataccatcattatggtattcacaggatatttacaggatttataaaagtagtgatgaatcactgatctcactttattttttataaatcctgtaaatatcctgtgaattccataatgatgatgaattatatattttgatggagtttaaaaagtgtcagcttattaaatgtaagcatctcaaatacataatgatttttgtaaccctattttatcatttctataatgtctaaaatatcaggagttgcaagcaatggaagtatctggtgacttagggcagctgagaagctctgtctgcttccacttggccctgagcacttctgtggacaaagcactctgacctgacagggtgctggttacacattggctgagtttgtggctatttctagggagcagagtctggctctttcctcatttacctgtacaataagaatacccgcctgacaggggagaggtgaggattcagtaagcacagcacaagtctctagtaaaagaaagctgtcatgaggatgataacagttaatgagaacatgttgttcaggaggttttaaagggcagatacagcatgatcctgatttttaagaaaattagatataaaaacatgggcacatgaaaaagccccaacaggctacagactgaaatatttataatggtagtgggaataaaggtgaattttgctttttccatgtatttgtctgttttaattttttcgcaatatacttatactaaatgatgatacttattttgtttatgtggatatacataaatctacagacatacaaaattatggataatttttcttttgtctttctaaatttataaaatttctcacttaaatatgtgcaagttctataattagaacaaagagatcaaaggcatttttaagacaaggagaagcagctgggtatcatggctcataattgtaatcctagcactttgggaggtcaagatgggagaccactggagctcaggagtttgagaccagcttgggcaacatagggagactgtgtctctacataaaagcaaaaaacttagccaggcatggtggcatgcatctacagtcccagctacttcgaaggcagaggcaggaggattgcttgagcccaggagtcggaggctgcagtgagctgagatggtgctactgcactccagcctgggtgacagggtgagacttcatctgtaaaaaaatgataaaagactgggagaagagcctggctgggttttaagcctacctggggacatggctgcattgtttctgagaaacacaaagagcctgctcagcacctgccatcatctcaaccagaaagcccactccagatgctgtcttgtcagtggctcagtcagtgcacctttgatttatgatgaattccccagtgtttacagactggtgaatgcagaacaatttctccccattagaaggagtcatggtgtggcaagttcagattagtttctcttctatggagtttcattctttcatgaaatgtggtcttgcttcacactgtgagggagtttggtgcctctctcggcctgggtcacctgctagtgtgtgtttggcactagaaagaggctctcagggaaagggttcctgactgcatccttccttccttgccccttctctctctccatgctctccaagaaaatatttaccacccttgaggcctcctactaccattaggaaaaagattgataaaacgatgactttaaaattaagaagttctgcttatctaaagagttcataaagagattaataacacaaaccacagaatagaagtagaagctatttggtaatacatataaccaacaaaggactcttatccagaaaatacatgtttaaaaaaaaacactaaaaattattaagtaagacataacccaacaaaaattccagaagtggtgggcaaggccagaaactcagacaaatgatgttggtaccaagaccaggctacacagtggctggaccagcagctggtaatcatgcagacccatgctcagccttttcgcagcgagatggagcaagtgctgtgagtgctggagatgttggcatgctgaggatcttacaggcagaggatccaaagagctcgctagaactggtcgcagaagccccagccagattcttaatgcctttaattttccagggaagaagcttctccatcactgaactgtttccatattatagatactgtaatatctatgggttttcctaatactcatctttgtattagctggcgtttttacccaaccaggaaaggagtggagccatgaagcagtgagtgcccagaactggaagaattctgaaggagatgggactgtggaccatgttctctctcaggctaacatcttaataacagcctactctgttccaaccagaaagaatgagagaggaagggaagacgaacagacagagacagatggacacatacttatgaagtgcccactgtgctcaaggaatttgctaggggctttcacatttgttgttcactttgcttcttgtaacactccattctgttgatgagacgggagcctcaggagaaatacatggcttgctcaagtttagtttgtcagtgatgtagttgggatctgatctcagggtctgtctcattttttttttgagatggagtcctgctttgttgccccagttagagcgcagtggtgcaatctcggttcactgcaacctccgcctccctggttcaagtaattctcctgcctcagcctcccaagtagctgggattacaggtgcctgctacaccacctggctaatttttatatttttagtagagacagggtttcaccatgttggcaggctggtctcaaactcctgacctcaagtgacccgcccgcctcagcctcccaaagtgctgggattacaggtgtgagccactgcgcctggccctgtgactcatttttctaattccatggccttggaatcaggtgtgtgtgagcttgggtaattatttacctctgtgagctcaaggcccctctgtgaaatgatatctggctagtaggagcacccttgcaggactctgcgcatgatgtacagtagttggttttactgtaaatgtactcaaatccttagcacaggatcaggtacactgaagacagtgaagagaagggagttaaacacttttgaagtcatattttcttttctcaggttcaaccactctgctaggagagaaaggcagagaacaggataagaagattgagagagagaggttgattgtgaggacgtagtgtctgggacacatatatttggtcacagagtcatgacttgaggggtggcacgctgagaagttgcctgtcttactctctgagactgagcagctaagatagaaggctgaatattgacttgggacaatacagtcatgagttgcttaacaagaagcctatgttctgagaaatatggtgttaggcaatttcatcactgtgcaaacatcatagagtgtacggtacttacacaaacctacacagcatagcctactacacacctaggctgtatactatagcctatcactcctaggtttgtaaacctgtacaacatgttactgtactgaatactgcaggcagttgtaacacaatggtaagtatttgtgaatctaaacatatcattaaaaggtacagtaaaatatggtatttataacatattttataaaaatatgatggtttctaccctggactagctaagagatctgaggctagcaactgtccacaaacctcctccctcttcccccaaccaaagccaaaaatatcttacccaccatttcttaaaacaaaacagcctgcaaaaccattcagcattctgcagtagaaaacacaaaactcaggttgccccattgaagaaggccagaaatctttggaacatcacccacttaggagcatcctgcctctgctattcactgccagaagttattttacaaagccaagcttctgtagaccgttcacagcatgggctggccttaatggagagctgggcaaggaaaattccctccttcgagcctgggctgaggaaaacctcacctgaggaatgagggccattcttgtttattatgattgaatcactatgcatattactttcatatgtaatgcatttgccattctgaagtatgcagtggggatgggggtactcccacttagccaaatcaaaacccaggtcccaagattctcagtagaagagatgggctcccttcactcgggaggtcccagggtggctgcaagtactctccttgtactattagggttgttttggcacctcctcttggcaaaccctaacagagacactgtctttgtttctcaatccctgctacagactgaaattatctgggaaattaaaaaaatatatatgatgacaagccgctacctccagctattctgacttaatacatttgcattgaagacaaggatttggggttaaaaaaaactccccaggtgattgtgatgtgcacccaagtcagaaccaagtgctataccgatttcatgtaaaattgttgattgatttatgtcttccacttcttgagctcctggtatatgccaggcactgaagcactaatgaacagaaacaggcaaggctcttactctcataaacattacagatattcgtcagataattacataagcaaataatttggaattataaaagtacatggtgcttggggctgggcgttggtggtgcacgcctgtaatcccagcactctgggaggcgaagacgggtagatcacttgaggtcaggagttcgagaccagtctggccaacatggtgaaaccccatctctactaaaaatacaaaaattagccgggtttggtggtgggcgcctgtaatcccagctactcaggaggctgaggcaggagaattgcatgaacctaggaggtggaggttgcagtgagctgatagtgccactgcactccagcctgagtgatagagcaagactctgtctcaaaaaaataaaaaaatgtacatggtgcttgggcagatagggagggaaggggtaagaggattagaaaagtgatccattagaagctccctggtgtacctctctctttccaatactcactcaccaagggatagccatatatctgactgaccaatgtctatctcccaataattccatgggaaataactcctattttccagtaataggagaatgaataaaatatgaaaaatgtagactctagggactttcaaaagagacaaaacccattgtgaggaaagaatatgttattcatgtatcatgtactaaataattaaaacagccaaacacagggctcacacctataatctcagcactttgggagaccaaggcaggaggattgcttgagcccaggagttcgagaccagcctagagagcccctgtctctacaaaacacaaaaattggctaggcgtagtggtacatgcctgtagtccctgctacttggaaggctgaggtgggaggatcacttgagcccggaaggtccaggctgcactcctgcctgggtgacatagcaagactctgtctccaaaaataaaaaaaaaagggcaacaccaaaacaaacaaaaaagaattaatacaatctgaaggatgcagagatgaggcagaactgctgcccaaacatctgtagcaaattagccagtgggaagaagtcagctaaacctagtagaggcaaagggaggaatagattacttctccccctaccttcccacaaggttctggattaaaaatatttgattaaaaaaaataaaattacgtgcataaaatctgaaaacattcttgttgcaaaaatgtttaagcaataacagtatattaagcaataacagtataaagagtgccaaccaaagcctccctttaccacatatcttgtttccaatcgctcttctctccctagagggatcatcattcacagctggctgtgtttctttccggaagtttttctttgcatttataaacacttatttccagaaacaagtgaatagttgttctatttgtctgtgtttttgcatactcttcacgttcatctgcaatttcttttcttttattcaacaattatattattttgcggtcaggatgaaggtgaggcgagtgaggcattttggcacacaatttaagggagtccccacaacaactgaagggattgccaaaagctcagtaatcgagataaattttagtgcaatattaaaaaaaaatctaaatcagcaccaaaaatgtatattgaacaaaatatcaaaaccttaaagactggatctctattactgagtgttcctttggctttgggcttcaatatggatgagcaggtgactgttactgatcctgtccatgtgatctttctatgttggtacatgtagatcttttttcctaaaaaaatcatatttagaaataatttcaaacttccaaaaattgcaaataactcccatattactttacccaattgctgatgccactaaattttctctattactctctctctgtacttatatatacccattattagtcttttaaggaacctttgtatattttctaaaacactaggatataaaaccagtatacaacctccaaatgaggacattaacattggttccccactgctgtccaatccatagtcctcattcacatttgccacctgtcctaacaatgtctctatttcctgtctggtccaggaaatgtatattgcatttaattgtcatgtatcctcagacttgtaaatctgcaacaggtcttttgccttttcctgttttctatgtccttgacagaaactaagtacaggacttccattctgtgggatggccttcaacatgggatatttccttatgtctagattcaggtacaccaagatctgctactgtgttcctctcaaggcattccttccagaagcacaccgtgttgacccatcctgacgctggtgatgttagcactgattacctagttgtgtcattgtctgccccatttcttcaccataaggtcatgattcttcccttgacaataccatagtattttgtaaagaggtgttcggagattattgcaatatcttgttccccatcaaacttccacccagctttagcactgatcgacaattctcacttcaactgggcatccccatgatggttgccaatgctggttttctatttccattctacgtgtattcgatggcattctactgtaaagaagagctttgaccccaccttatttatttatatgtttatatcagtatggattcatggtctcctattttattcggtaggttgtaattcattactatccgtatttattctgattgttcagattcttatttgttcagattgtccctgttttggccaatgggaactctgtcaagccagttcctatgtccttttgatatatgtccatctgtcattgagcatttcttcactttctgacacaatataaggttccagtcctgtcttgtcctttccctgctccagccctagaactagccatttccacaaggaacactggtaccttttagtaagaatgtaatttaggaaccaacactggaaaaccagatgtgctcattaccattgaagtgccattgcttctaggccctgtcagtggacaacgctaggaaatagacgctctgaaggctgggaaatccaagatcaaggcactagcagactcagttgtttagtgagagctcctctctgcttccacgatggcaccgtggtactggatcctctggaggtgaggaatgctatgtcctcacatggcagaaggcagaagggcaagagggctgaacctgaatgaagcctcttttataaaggacattaatccattcacgagggaggagcctccatggcctaatcagctcttggaggctccacctcttaataccatcacattggccattaagtttcaacacttaaattttggaggggacatattcaaacctcagcacatacatactcacaaatatgtgaatgcactcaaacatctataactattcctatttttatatctgtatgtatatatatgatctccatctgtctataaaatatatacctaggtatctatatgcatctacatatatattgatgtctccatacatgtttttttttttgagactgagtctcactctgtcgcccaggctggactgcagtggcgtgatctcaatagctcactgcaacctccgccacctgggttcaagcaattctcatgcctcagcctctcaagtagctgggactacaagtgcccgccaccaggcccagctaatttttgtattttcggtagaacagggtttcaccatgttggccaggctggtcttgaattcctgacctcaagtgatccgcctgcttcggcctcccaaagtgctgagattacaggtgtgagccaccacacccggccggaatacgtacttcttttaaactaattttccatattttggatgtaccttcgttatctataaccacactgatggatcaaaaatggttagcctcttgaggctctccttgatttgtataacaacattacaaacaaggactaaagcctccttttgtctaattctgacccggttcacagaccaagagccctttgaaaaaagaggaagctggatacccttgaggaacaaataactaaaatgccacaagtatgtactcagggtccaactccagttcatttctaatggaataaacaattaaccagctaactgtgtggtgagaaaagagaagtacccagattttgggaagtacccagataccttaattcacagcaacccagaaagccactgttgtccccagaggatgtggggtcttatagggcaaactttagtcttaaaacacacatgtagaacttcaaagacttttcccttaccaatggagttatagcttcccaagtgcatcaacatatttttgctttgttctaggtcagtagaagacttgaaaaaaaatgctaggcagcacatactgtttatgacattgtgtcacagatgggaaagtaaaatctgggcatgtgaaaggaatgttagcatccatggctcaggagaccccactcctccacttccttgatgcctgtattccaggtctttagcagtgagcactttttgcacaacagccctgccaatgagagaagctacagcctcttacacacacacatacacacacacacttagaaaaagcaggcacagacttagtaaaatatcctcatggcatttcctagattctaagaagtatggcttttcaggtattagcatttctgaaatttgatgtattcatttttatttaatcagtgtgtttctttaaagtggcagtccttacttttgcaaaaacaattttgttattaaatcagtggacatttcatccaggcttctgggaaagccatgctattcacaggttctgtgttgggagtggcccaatttccaacattcagagagttctccagcctcaggtcagccactcaaggagaagctggagctgtcttcccgctgtccccatctccctccactccctgggcctgcttgactcctttagacataattagactcttcttatatcttttcaactcagaatgggcaaggttcatgttttcatgaacagtaggaccaaattgcattgtgtgatagtttaaggttaggtggttaactgtgatgcaaaaatacataaaaatctgaaaaaagtaagcattttgataacttgtttttataatcagcctaatttttaatcaagtctactatttaatttataatataacattattagtcaatttagggcagtaaaatttgtgtcatttctttttagccataatttactagaattaactttcattggaatttttaaaaatctagaaaatacataccttttctaaatgtagcacgagtagtaaatcaaataataacgatgaaagtaattttgaagacatgacaaccaaaagagtttctgctagattgactcagaagtataatcctttacatactgagttcagttgcactgctctaattaattgagaagcactaaaatttgaatgtgttatttgcagagatatactggctaatgtaagcaattcaccgtcaaactataggcaacatgcatacgcaactcataaagacacacattcacaatgaaaagaattgtttgaaagaaggaatattgaattaaaaagttaatggaagaagatgttcaatatttcatatatgaagagtgagtagtacttttcaggcttcttatcaagtagcactttgcatgactaggacaaaaaattaaattgtggtgacattagcaaaaaacttcataaaaaatgtttgcttggaaatgatgggggaatcttgagcaaagaagatactgtgaagactgttttccaatgaaactatagattaatgtattttaaaactatctaattatgtggaagaccaatttatggtacaaataaagccagcaaactattttttaatgaaacctgatgcacaggtaacgctaacaaagcaattcttttagtatatgtgttatttgagcatgatggtaatatgaaagtagaatttttttttccaacttcattaccataaacagaactcagaactgtataaaatgatgatagattacactgtctatgtggtttggagattaggggtagaagtatttttgatgcacagatgtaatgacaggtaagcattctggagtagttaatccagagaaaagagctgggccagaatataaaccaacatgctgttccttcattgagaaagtcttgctatcaaacaaacaaacaaaaaaaccagctgaaccaatagtgtcttagcagcatagttaaaattgtgagttacataaaggattatgtgttaaatgtgaggctattctgtgatcatatggaagctaatcataaacaagtggtgttgtatgatgaggtatgatggttgctgagtggagaattctgcagagaataaacattctctgcaaacaccaactcctggtatttctgcaagataagaaactaatttggtcccagctttttaaagatgtcagaattgctaacttttatgatattcccaatatgtgaagttatctcactaatttcacgcgaggatgaaatgaagtattttcaaatgcagataagatggaatggcaaaatggcaaaacaagatggaagactggaaggacaaagtttctgcagatggttatggcatgtttcataatttcacaattatcgatagcatagatgaagacctggaaactgcacaactgcaaaatgttctcagtaaatgattgaaagtagatgagctttgtgcaggcagaaatctactgtacaactggcaagggcgccatgtggaagaagtgcttggctcactggggggtctgaatgtagatttgcacagaatttttgaagggcaatttgacagtgtatatcaacattttaaaagtatgtaattttgaaatataatttacagagaagtgtataagacagaaatgaagagctcagtgattggtcacaaaaggaacacccgtgtaacttctacccaggtcaaaataactagtagtatttcacttgtattaatggcaatccattttgccttctatttgtctagttggaaaacactcttccattaacaaatccagtttttaaaataactgtaactgaaattctggccagttctatataaacattgcattcctttgaaaagttcaatggttaaaagaaatcaaagtattaaaaggaaaaataaataaataccagccgaaaggtttataggggtagttgtctgtgaagaagaaaaggtaagttctcactggagcaggagttgtggggttgcagaaagtgggtacagcaagagtggaggagtgagaggaaggctggtgtggaaatggtctggcaaagcattttagagaagcggtggggctcagggaaagcccagtgaggctggatttcagagtggttggtaacaaaattccaaatttgtgaaaacataactctgagttttaaatacagctgatccttaaatgatgcaggggttaggggtgcctaccccctgctcagtcaaaaatccatgtgtaacttttgactcacccaaaacttaactactgatagccttactgataacataaacagtcaattaacacatatttagtatattagatatattatatactatattcttaaagtaagctagaacaaaagaaaatgttatttaaaaaatcctaaggaaaatccattgacagtactctactatatttatctgtattgtaagttaactgtttacaaggtgaattgtctttctgaaatggcaaccatagctgcagacctcaatccacagtacgtatcaagcaatctaactttttcttgtaatgtcatgaattttctctgcttcttgagacacttccagcatcactaggggcactttgtatggattccatggtgtgagtcaaggtttacagtattgaactaaacataatgaaagctatgtgagaaccatgagagatcacatgtactgtggttccaatggtctgcagggagaaactgctcacctggagatgacctgcatcacttgagttaagcagatactcacgacagttgagctccccacaatagcaacaggaggtggctatgaagtttttacagtagtacagtatataccacagttcatttggtgcattacgatttaatactgcatcttatatttgtttacatttctcttgactgaattgtgtcatctaccgtctgtaagtgtgtgcataagtttttataaattttaacatattataatggactcattttatggtaataaatgataaaatggaccaatatcgacgtatattttatacatttatgacatacttaactttcttaattttttcattatttttaagctacatggttcacatcaaagttttttcaaattgttggaaatgtagaacacattttctaatgtatttattttaaaaacccacatagaagtggactcatgtagttcaaatctgtgttgttgaggggttaactgtttatcaaatgatccctcccaccagcccacacactgaggatacatgccaagtctatcatatctaagtctcattctcattccagcttgttatatttgagcaagcagccaggtggtcacaggtgttaggactgagtagaaaaataatctggagcatggaccacagaggctgtgctttttatctagtgcctaaaagagtctactgtccatatcagtggcaatgtattaaattacattacaaattagtaaacaaatgaaaaaaaagtcaaactgtttaagccaaaacattcagccttttggaaagataacaaaaattcaaacatgtttccttagggtcctactgtgagctagattagaattttgtaaattaaaattagaataatacaggcacctcaatttgttatgttttaacaatgaaaataaagaaactgcttattaaattgttctttagtgaatgtgagtttgtattgtaactctatgacatatttcctactctatagagagaagatcataaacccataaatgtctgtccttgaaagcagagagagaacatgtgcttcatgatagcaccaggccagactgcatctgtgaagaatatagaaaagtttgcaaaggtgtatcccttcattgggtatgtaaaacacctctacctgttaatgtcattaactgcagtttgggtcactccaaagcatattatttctagacagacaacatacagtgtctttagaatgtaaacactggacaacacagcaagaccctgtctctacaaaaaattaaaaagttagctgggtgtggtagcatgcacctgtagtcctagctactcaggaggctgaggcaagaggatcttttgagcccaagagtttgaggctgcaatgagctatgatcacaacactgcactctagcctgggcaacagagtgagaccctgtctgtatattaaaaaaagaatataaagactggatctagatagaattggctttatgtattacacatatcagataaaaaaaccttcaaaaggtacatttttataaaattatttttgtgctaaacagtataaaatgtatcatcttaaccatttttaagtgtgaagttcagtagtgtcagctattttcatattgttgtgcaacagatttctaaaagctttttcatcttgcaaaactgaagctctatacctattaaacagcaactccccctctcccctttccccagtccctagcaacaattctgcttgtttctaagagtctggtttctttaaaaccacatttaagtggaatcatgtagtatttgtctttttgtgactgtcttatttcacttagcgtaatgttcccaagatttgacctagaacaaactgctgaatgtgcttattacagtatctgtatgccttttggtgggaaaatgttgaaaaaaaaaaaaaaacaaaaaaaaaaaagacagctggtaacactgcaatgcccaacgcccaattccaaagctccttaaatattccttgcagagttaatgttttggagcagtgcttctggcaggcctcttctcactttttgttttgttagggggcagttgatggcatacctaatatattcaacatccccgatcctctatagggcaagattaccttctgtaataatcagtaataatgattctcttgatttgttctttagttttataacaactactaaaagagtatacattttaaagatatttcacatatgaaataaaatttgtgttaacaacaaaaatatatctcacaatttgccctactttactgtttccaactttattatttttttccttttattttttgagatggagtcttgctccgtcacccaggttggagtgcggtggcatgatctcggctaactgcaacctctgcctctcaagtttaagtgattctcttacctcagtcttccaaagtagctggaattacaggcacatgtcaccatgcccagctagtttttgtatttttagtagagatgggtttttgctgcgttggccaggctggtctcaaactcctgacctcaggtgatctgcctgcctcagcctcccaaagtgctggaattacaggcatgagccaccgcacctggcctgttttcaactttaaatacaaatgaaaacgctaagaggtcacaaagactgacatgattgaagtaactcaggttttgcttcttcatctataaggctgtgccatcattgctgatgtcaaatctaccatctcaatgcaggaatgtgtttatcacttgagccggattcaggcacacactgtgccagacagctggaacaattctcaagtataagcggtaaacagatgtactaattgacagattacatgtatattcttaaaactcaccagtaatcactgctattgtatagagtgcagaccaataattttgtttttaggtaggagtgttttattattgactttttttttttttttttttttttttttagacagagtcttgctctgtcgcccaggctggagtgcagtggtgcattgttggctcagtgcaacctccgcctccctagttcaagtgattctcttgcctcagcctcccaagtagctgggattacaggcatgtgccaccacatctggctaatttttgtacttttagtagagacaggatttcgccatgttggccaggctggtttcaaactcctgacctcaggtggtccgcctgccttggcctcccaaagtgctgggattacaggtgtgagccaacgtgcctggccttaccattgacattttttataattgccagggagtagtgacaataaaaagtaggtcaactttccattggttttgttactttataaattttttttcgatgttccctcttgcctgcaccacgggcaggcttaccttgttcttggcactccaccctcttgaatgtcttacattttgccactttagtggcaaaatgactcctcccacctcatcagagctgccacggccagaactcactttcacagagggccttgaatttagaatgtggacatgccatttatatgaggctatttctgtagtcagagacagaccaacaagaatgaaggaaggagatgttcaccttacaatgtttaacttatgccgttagtggactgctatgtgtaaattaatattgttaaaaactctgagattatttttataaatagcacaagtataataaattgtacatttggggtgttttaaatgggttaatttaaaaaatttaaatgttaaaacagatcgcaacttttataaccattttgccatttctacaaaatgacaaagtaatagatgccattgagcctgtttgcactgctaaagcaaccaaccctctgggttgcacagaactacaggatttcacgggatgcagggctgtcagtgctaaaacccagacagtcctgtccaggtaaaccaggatggttggttactgacgtaggcccttcagagtacagcacaccctaatcttagaggatgcctggtttcttactgctgagtctggagattttttctggtaaagaacagaagatagatgttttcccttcatgctgaaacaggcactcaaactagaagagttcagcttagaggaacggaggcctccacaaccctctgcccacatctttctaaaccaatctctaactcaaatagactaccggacaacaacaacaacaaatgcaattacataatgtcctttatataactcagagtagagtgttttataaactaaaatcaaaatggccatagaaaatttgcaattttctttctgacctgagagagacttacctttctcaaaattacctggaggctgttgccacacctctgtggcataaattcagaaagccctagatttggggttccagggctgaaatgtaagtatccagagatctaagaaatatttttgaatatggaacgaaataaaaggttcagagagtattacagccctgctgaaactgtaccccaagtgaatcgcattactaaaaaatcaatacacattaccaacagccaaactactgtattgttggaggtttagtgctgaaacaaataatagtaaaagagaatagtggtgtttctcatagattgcatgttgtcctttaaccaatggcatggtctgcagaatctataaataatgatttatagtagaacttaagtcttgaaataaagtcatttgtgatcaagtttgattaacatatttgcctgttgctacttgaaaaacaaaactaaaccaaatcaaaacaaaaaagacttctagacctgaaagaaaagaatcaaaatggtaaaataaacaaaaaagttacggcagcttcattaattaaccacttaagacttggccattcacagcaccagtgagatttcaactgcaaggtcagttaaaacaaaggcaattggagctcatgaatgactgaaaatagattacttttatcaaagtggagagtcagataaaaagtctcaccaaaaggatgtggggaagacagtaatcatgtctgcatttgtggaaaagtaaacggatacaagctttttggagggcaatttgaccccatatacagaattttaaatacgcatatactctgattgagtaaggtcatttctgagaacccagcacactgaatatttacacaaatttgcaaaaatatatgaacaaggaaagcttattgctgaatatctgtaacatttgtaatagttaaaagttgacaacctagatatttaacaatagagttaaaaacttcattgaggtgttttgtatacactgacatggaagtaagttgggaataaactggggagaagaaaacaagttacaggcatgtacagtattaaaataagttaaaaaataaaacaatctgaatacatgtgtatatgtatgctcataaataatacaggaaatactatattcccagcaaattgtcaagggtggttagtacttgggaatgggactggaagtatttcatttgaatttttttagggtgtgcttatattagtttctgttttttaaggcagaattttttttttttttttgagacagagtttcactctgttgctcaggctggagtgcagtggcacaatctcggctcactgcaatctccgtctccttggttcaagcaattctcctgattcagcctcccaagtagctgggattgcaggtgtgtgccaggtctggctaatttttgtatttttagtagagatggggtttcgccatgttggccaggctggtctcgaactcctgacctcaagtgatccacctgccttggcctcccaaagtgctgggattacaggcatgagccaccgtgtctggccagaatgtctttaaaaacacttttttttatttttatttgtttttttttttttagaatcagggagctgttgttaggtccttactctgaataccatgtacttgcattgtctacataagagacaaaaagcagtggtgactgccactggtgacaaaccaggctctccacaccatctcagaaaacaaatgaacaaacaaacaccttatctatcctactatattttgaggaaaagggttcacttaggtaatattaaagtcacttatcaaataaagctaatatattgtctaaagaactaaagttatgtgtttgggcctattcatattgctctattttaaatatggaggataaaaagaataaagaatgcttttccttcttccctaagttatttcttactctcttgggttttcccaagcctacatctgtctctctctagacaccatccaagtaaattttcagatatttttaaaacaggaagcagaagctgtctgtgaatggctctaaaataaatgttatttctggaaggttccaaatggcctgggggagtgaagtgggactaatagaaacaaatttgataaagttgcatggtacaagatcaaaacacaaaatttagccatatttctatatataagcaatgaacaatttgaacagaaaattgagagaggacaattacatttacaatagcatcaaaaaataaaatacctaggaataaattttaccaaaaaggtgaaagacttgtacactaaaaactataaaacactgctgaaagaaatttaaaaagacctaaataaatgaaaagacaactgtgttcatggatcataacacacagagagccctgaagagctgaaacaatcttgaaaaagttgcaggactcacacttttagatttcaaaacttactacacagctacagtaatcaaaactgtgatactgccataagaatagacatataggccagtggaatgaaatcaagagttgagaaataagcccacacatctatggccaattgatttttggcaagagtgccaagactgttcaatagggaaagaacagtgtttcaactaatggtgctgggacaactggctgtccatatgcaaaagaattaagttggatccctacctcacaccatattttaaaaatcaacttaaaatggatcaacaatctaaatataaaggctaaaactataaaatccttagaagaaaacagaggtatatcttcatgactttagatctggcaatgggttcataaatatgatatcagaagcatgagcaaccagaggaaaaatatagacaaattggacttcatcaaaattaaaaacttttgcgcattaaagacgttatttagaaagagaaaagacaacccatagaatgggggaaaatatctgcaaaccatatccctgataagagtctactgtctagaatatataaagaattcttgcaactcaacaacaaaaagagaaaaaacccaattaaaaaatggggaaaaaacttgaatacacatttctccaaagaggatatataagtggccaaaatgcccctgaaaaactgtgcaatatcattagtcatttggaaaatgcaaatcaaaatctcaatgaaacttcacacccggaaatggagacacaaaaagcccttcaaaaaaatcaatgaatccaggagctggttttttgaaaagatcaacaaaattgatagaccactagcaagactaataaagaaaagagagaagaatcaaatagacgcaataaaaaatgacaaaggggatatcaccaccaatcccacagaaatacaaactaccatcagagaatactataaacacctctacgcaaataaactagaaaatctagaagaaatggataaattcctcgacacatacactctcccaagactaaaccaggaagaagctgaatctctgaatagaccaataacaggctctgaaattgaggcaataattaatagcttaccaaccaaaaaaagtccaggaccagatggattcacagccgaattccaccagaggtacaaggaggagctggtaccattccttctgaaactattccaatcaatagaaaaagagggaatcctccctaactcattttatgaggccagcatcatcctgataccaaagcctggcagagacacaacaaaaaaaaaaaaaagagaattttaggccaatatccttgatgaacatcgacgcaaaaatcctcaataaaatactggcaaaccaaatccagcaacacatcaaaaagcttatccaccatgatcaagtgggcttcatccctgggatgcaaggctggttcgacatatgaaaatcaataaacgtaatccagcatataaacagaaccaaagataaaaaccacatgattatctcaatagatgcagaaaaggcctttgacaaaattcaataacccttcatgctaaaaactctcaataaattaggtattgatgggacgtatctcaaaataataagagctatctatgacaaacccacagccaatatcatactgaatggacaaaaactggaagcattccctttgaaaactggcacaagacagggatgccctctctcaccactcctattcaacatagtgttggaggttctggccagggcaatcaggcaggagaaggaaataaagggaattcaattaggaaaagaggaagtcaaattgtccctgtttgcagatgacatgattgtatatctagaaaaccccaacatctcagcccaaaatctccttaaacagataagcaacttcagcaaagtctcaggatacaaaatcaatgtgcaaaaatcacaaacattcttatacaccaataacagacaaacagagagccaaatcatgagtgaactcccattctcaattgcttcaaagagaataaaatacctaggaatccaccttacaagggatgtgaaggacctcttcaaggagaactacaaaccactgctcaatgaaataaaagaggacacaaacaaatggaagaacattccatgctcatgggtaggaagaatcaatatcatgaaaatggccatactgcccaaggtaatttacagattcaatgccatccccatcaagctaccaatgactttcttcacagaattggaaaaaactactttaaaattcatatggaaccaaaaaagagcccgcattgccaagtcaatcctaagccaaaagaacaaagcaggaggcatcacgctacttgacttcaaactatactacaaggctacagtaaccaaaagagcatgctactggtaccaaaacagagatatagaccaatggaacaaaacagagccctcagaaataatgccacatatctacaactatctgatctttgacaaacctgacaaaaacaagcaatggggaaaggattccctatttaataaatggtgctgggaaaactggctagccatatgtagaaagctgaaactggatcccttccttacaccttatacaaaaattaattcaagatggattaaagacttaaatgttagacctaaaaccataaaaaccctagaagaaaacctaggcaataccattcaggacataggcatgggcaaggacttcatgtctaaaacaccaaaagcaatggcaacaaaagccaaaattgacaaatgggatctaattaaactaaagagcttctgcacagcaaaagaaaccaccatcagagtgaacaggcaacctacagaatgggagaaaatttttgcacctactcatctgacaaagggctaatatccagaatctacaatgaactcaaacaaatttacaagaaaaaaacaaccccatcaaaaagtgagcaagggatatgaacagacacttctcaaaagaagacatttatgcagccaaaagacacatgctcatcatcactggccatcagagaaatgcaaatcaaaaccacaatgagataccatctcacaccagttagaatggcaatcattaaaaagtcaggaaacaacaggtgctggagaggatgtggagaaaaaggaacacttttacactgttggtgggactgtaaactagttcaaccattgtggaagtcagtgtggcaattcctcagggaactagaactagaaataccatttgacccagccatcccattactgggtatatacccaaaggattataaatcatgctgctataaagacacatgcacacgtatgtttattgtggcactattcacaatagcaaagacttggaaccaacccaaatgtccaacaacaatagactggattaagaaaatgtggcacatatacaccatggaatactatgcagccataaaaaatgatgagttcatgtcctttgtagggacatggatgaagctggaaaccatcattctcagcaaactattgcaaggacaaaaaaccaaacaccatatgttctcactcataggtgggaatagaacaatgagaacacatggacacaggaaggggaacatcacacaccggggactgttgtgcggtggggggaggggggagggatagcattaggagacatacctaatgctaaatgacaagttaatgggtgcagcacaccaacatggcacatgtatacatatgtaacaaacctgcacgttgtgcacatgtaccaaaaagttaaattaaaaaaaaaagaaacttcacaccccttacagtaactataattaaaacaaacaaaccagaaaataaggagtcttggtaaggatgtgaaaaaaaccaaacccttgtatattgctagtgggaatgcaaaatgtctagctgttgtggaaaagtttggcgattcctcaaaaagtaacatacagaatttcagtttgatccagtagtttcaaataatagtcccaataattgaaaacagatactcagacaaatacatttacgtgcatgtccacagcagcactattcacgacagctgaaaggttggaaaaaacccaaatgtccatcaacagataaaaggataaacaaattgtggtacacacatataatggaatgttattttaccataagaattaaatgctgatacatgctacaatgtgaatgaacctcaaaaataatatgctaagtgaaagaagccagtcacaaaagcctacatattgtatcagtccatttatataaaatattaacaataggcaaatccaaagagacaaagcagattgttgttttccaggggatgcaatgagagggaaatgagaaataactgcttaccaggtatggagttttcttttggggagataaaatgtttgtttgtaaaaatggagtctcactgtgttgcccaggctggtcttggactcatgggatcaagtgatcctccttcctaggcctctcaaagtgctgggattacaggcatgagccaccataccccaccaataaagtgttttgaaactagatcggaggagtaattacacaacattgtgaatgtactaaatgccaccaaattgtgcactttaaaatggctaattttatgtatgtgacgttcacctcagttaaaaaaaataagcatcaatgagatgctgacttctactcttcttcaatcaactactcagagtaagagtaaggagtaaggggaaaaaagccctaaaaatcgggtctgcctttgtgtggtcactactaaaccttctctaggctgcactgaccacctcagagaccactagcagtatttgccaatttcaacatcaaaaattaagcatttattctctgtgatggtaaatatagttcactgacattgaaataaaatgaaagtggtgggctgggtgtggtggctcatgcctgtaatcccagcacttttggaggccaaggccggtgggtcacttgagaccaggagttcaagaccagcctggccaacatggcaaaaccccatctctactaaaaatacaaaaattagctgggcgtggtggtacatgcctgtaatcccagctactcgggaggctgaggcaggagaatcacttgaatctgggaggtggaggttgcattaagccaagattgtgccattgcacaccagcgtgggcaacagagcaagactctgtttcaaaaaaaaaaaaaaaaaaaagatgtggaaagttcttcatcttcgttcaaactctacttactagagccacctgctgcatttgtccccctacagtacagggcttctcagccctagttgtgtattagagttaattatctaaaatcttttgtactctatttttttaaaaatcccaatgtccagactccacctgaaaaattctgattcaattggttggggatagagcttttttttaaattaaacttttgaaataattgtagattcatatgtatttgtgtagaaaataatacagtgattcaacatacccttttacccagttttctccacaatggtagcatcttgcaaaacaagatatgtacaagatgtgtataatttcaccaccaggatcaggattttttttttttttttgagacagggtcttgctttgtcacccaggttggagtgcagtggcatgattaaggctcactgcagcctcaacctcctgggctcaagcctttctctcacctcagcctcccaagtaattgggacaacaggtgtgggcaaccatgcctggctaatttttgtattttttcggggaggtgagttttcatcatgttgccaaggctggtcttgaactcctaggctcaagggatccgcctgcctcagcttcccaaagtgctgggattacaggcatgagccaccatacctggctctccaccaggatattgagattgctataataaaggcacaaaacatttccatcaccaaaggatcccttgtgtagcccatttttaaccacacctccttacctcccacttctctttcctctcccatctcctaccctcacaacaactaaccttactttatttctataattgtcattttaagaatgttatataaatagaatcatacaatatgtaatctttggggattgacttttttcactcagcgtcattcactgaaggttcatctaagtcattgcatgtatcgttgcatgtatcaaaagttcatttctttcattgctgaatagtagtccatggtgtgggtgcatcacagtgtgtataaccatttgcccactgaaggacagctcggttgcttccagatttttttttggttatgatgaataaagctgctatgattactcatgtataggtttttgtgtgggcataagttttcattttcttggagaagtgcccaagagtgcaattgttgagttgtatggtttttgcatatttagtttcataagaaaatgccaaactgccttgcagaggtggctgctggaataaatccaccagcaatttataagtgatccagtttctctgcatcctcaacagcatttggtgttgtcactattttcattttagtcatcctgatatgtgtgtagtgataactcatgtagttttaattcacatttccctggtggctaacgatgctgaacaccttttcatgtgcattatttgcatctgtgtattctcttcagtgaatgtctgtcttttgcccattttctaactgatacttctcactgttgagttttgagaattctctatattctagacactagtcctttgtcagatttgtggtttgcagattttaaaagaaatttgtaatttgtctttcatcctaacagggtctttctcagagcaaacattttaaattgtgatgcagtccaatttatcagttttatgaattatgcttttgttgtcaagtctaaaaactttttgcctaatcatagatcctgaagatttcaaaacccaggtgttaatttgatcaggtctgcctaccctgcttggtttttttggtcgcttgcttcttgttattttttttccttcctttttccatgaagctgaaggcctcagtagctgaagcccttgctgctgcacactgaaatttatccttccttggctcctttatcggtaactcatgggtcaccatggtaatggtcacttcagttgtttttcaggaacttgggccagctcctgtccagtttgaactggttgaggccactgccccttcaactgggcttgtgcaggtgctggagaggtggccttttgatgttagagggccaaagcttctccctcggatcatgctaatgctggcattttctgtgcatatgttccatgaaatgacacttgtgcagaacctgccacttcatttttcccccactgtcaatcacctttccccacaccttagaccaccccacttccctaacccataaatatccctaagcctcatctttggggaggcagatttgagagctggtctcccacctcctcacctggcagctttgtaaataaatattttgtcttttgcaaatccaggtgactgtgactgacttactgtgcatgggcagaacagacctggacctggctgataacaattttctcctatttttctcttaaagttttatggatttatacctgtgatccattttgagttaatttttatataaagtgtgaaatttaggttgatgttcatgtttttacctgtgcacatccaattgctccagtaccatttattgaaaaggcaatccttcctttatttaattgcatttgcattttgtgaaaaatcacttggacatatttgtgtagtctatttctggatttttctattctgttccattgatacatgtgtctactcctctgccaataccacacagtcttgattattggttatgtttaaaaagtttctgaactaattctcagtgtggcctgagaaccatttctgaagctagaagaaagtctccaagagactgactagtccaattatcccctgtaatccacaaaggtatagtcaaagtgtgctgtactgagagtcaaaagacctgggtcttgtagtctcagctcatcaggatgtggctgagtgacctggctaggtcttttagtctgagtcccagttttctcacctgtggaactgggatgctcatacagcacttgtttagcctaccctcccagtatgcttgtgagtgtaaaaggaaatatatttgatctatatgtaaggtttagacttaagcataattcaaatacaaagggttcttattttagggataagcacaatgagattcagagattaaggttctccttacccaaagtcatcttctatttgacttcgtggcacccatcagaaaatttcacatattattcagcacatacgtagtgtccaaactctgccaggcactgtgaaaagtccctggggtacaaacacaaaaagacatggtctctgccttaagaatctttctatttagtgaggacataattttacaaaagctaagtgaatacaaattaaatttgtattgagtattcctttagaattccaggaccctcctagttggatgagtccacaggacaataaatcattgtcctagcatctctgtaagtccccagctatactttcagactttcacagggatgcacactgactttggtagagtcaacaggaaagagggttttcctggacagagctaaaaatcctgtgaggttcacacacttgtaaccccttcccagcgatcaccatctacactccaggattcctctgccatccatttattaatcaaaaacatcccacagagcctattcagggcccagatgtcaggcttagtatctgggtgataaaataatgtatacaacaaactcccatgacacgagtttacctatgtaacaaacctgcacatgtgcccccgaatataaaataaaagttaaaaaaatacaatttttaaaaaatttaaaaagtgtatattgcctacatcaggtggggcagatcgtgcagacagtgggcattcccaagggtcagcctgcttcttctgtgtgctcccaggtctcatttcatgaattgatttcagccaaggactatctataatgtaactgcatgtggactagctttgtcagagaaaagactggatgtaacattcttctacgtagccggcactgaagaaaatcttctttggaaaacaaaggctattactattaaatcacttaaacattattacatgctatttggtacgttccaagtgcatgagagtaaagcaaaacacacaatagcaaaacatgatctactgcagcaaaatcaaaattcagtttctagagtcacagctggagagatgctctgatgtaaccacaagtgccatcccagccactggtgaggctctactgcccccgggtggctgaagtccttctctgacaaagctgccggtgctctcatgctgataatgttacagtgatttttacaagggcagagtggatgtatgaatagttggatggatggataaatgcatggagggattggggtattcattcatttaatagtatttaatttcaactatttttccacacatggggccaagagctgttaagacatgatgtttgagatctgagatgtaaaaaactgcattggtgttaattaagctagagctgtggtcctagctgctcagtgcattggtcccaggagaatggggcggggcgggacggggcggggaggggggtggggtgggcggggtaagaaaggattaaggaagtgacctaagataagaggggagggacttcccaaatatacttcttctagggagacaaatatagctctggctaacccatagcctattaactcatcacttgggttaacaggagaaagaataaaaaacagtaagtgtggggttagatgtatactagaaggaatacagggaaaatccaaggtgggaacagggagagtaggcagaacactttgctacactgaaaaacaaagtcaaacaggttaaaacaagatatggcacttgacgtgactggtcttcaaagatgatgccactcagtattagttactatactattgatggatatgcaaactggtacatttattttgacatagtggtttcacaatcaggaatttattgtctagaattacttgcatgatatacagagagaagaacagatgagaccacctgttattcgtttcacctggacttaaataatagagttaagacacttcgagatgaggagtttcttctggagattgaagattgtgctggaagttgtcactgtagctgggttagtattgttagctctttttaagggtctgtaaaaattctacaagattcccagcgatctttttaagattctataaaaattcccagtcttttgatttcaattgaactcaaatatgcatttattgagcacctgatgaatgcacactactttggctgggttttaggaggttgtgatgcagggataactcagatcagattccttccctcaaagaccttggtctagagaagcctggcttgtaaaaacataaaatacagaatttatggtgaaataatggctacaatacagcattatgaaaatatgggatagggaagatatgatacattctaactggagggatgatggaggggagattcccagcagatgtggcatttgagccttgaaacagaattttgacagctctaggggaagagggtgggggaaagtggggaaggattcttttcctttaggttggaagagcatgtgttgctatttattaagtctttattgagcaccagcaaggtgttgtgtaaaatagacagcataaaaacaactataaaggggagataaaatacatccctgaaaaaaagtcataacagtaaatgatactgtttgattacctatcaaaacagtctacagaatccagaggtgaagcagaaatgcaggctacttttctctgggtagtgaattagccacttcaaaaatatttcagtgaagtcagtaaaggaaaacatgaggcataataagacatttctaccactagccctcctttcttcactagattttgtaaaaagttactgtttctatttttaattacatgagtaatcttgcttcaaaaaattcaagggataagaaaaagtaaaaagcaaaattctcccttcaaaatcccctgttctcctccaatctcatttctctttctggaagtaagcactattatcagcttactgtgtttccttccagaatgatttcagatgaattcatggaaatatgtaactggtgtaattttgcataagtggatatatgtgtttttctgaacttttttactcaacaccatattttagagaattttatatgttagcacatagaccatggagtacagagctacaacatttttttttttaaactggaattccacaattaggatataccttggctatttcaccgtttcctttttaatggttaacaagatgaaaactgctaaagtcttattggggtttttataaccaaacaagggaaaaacgactccaactctgggcctaaaagacatcctacttgaacctctcacttgcagttcctcattcaatccccaaactgcagtgtgtttcacaaatccagtctcctaagtgaagggaaagcaggaaacccttgacgaattcagtagtaatacaatgagataagtatgtgctgtgattcttaactcctagccttctccaaagggaccagtgatcatctagggataaatatgcactgaaaaaaaaggaaaatcgcagtatgccacagtagttcactggttagagtggggtttacaggggtgaagtaattaaaggaattttaacccaagtccaccttacagtaagttcgatggaaccctaaacccttccagtgttttttccccaattcctgagtgtacatttaaaggacataaggcagaatcttcacattggtttcctaacctttagaacaagggtgagcaagatagaaaagactatgaagaatccacagagctttattacactctccaacccccaatcaaaatagtaatgcacaagttataacaatcccttgttgactagctatagtgtcaccctaaaatatctgaatcaattatcttaatttatacctgccttccagcttgactggtaatgaaaacagatggacctggaagaatgactgacaattattaactcaattaagtagtgtacccaactgcaggtgcctttccaagcatggtctctttcaaggaacaaatcaacagagacccttgtatgtagctattgcttacgcaaatgctttctcctcctccatttaacaagcacttactgtcttacagtttctgtgagtcaggaatctaagcgtggcttagctgggtgcctccatctctgggtttctcaggcagctacaatcaagatgtcagccgggctgtggtcaactccaggctcacctggggagaatctattaccaagttcactcacctgattgttgtcaggcctcaggtccttactggctgttggctggagacattggttcctcaacatgtgtccggaattggtgggttcttggtctaacttaaagaatgaagccgtggatcctcgtggtgagtgtcacagttcttaaaggcagcatgtccggaatttgttccttctgatgttcggatgtgtttggagtttcttccttctggtggattcgtggtctagctggaccaggagtgaagctgtagaccctcatggtgagtgttacagctcttatggtggcccatctgagttgttcattcatcccggtgggttcgtggtctcactggcttcaggagtgaagcggcagaccttcgcagcgagtgttacagcttataaaggcagtgtgggcccagagtaaacagcagcaagagttattgcaaaaagcgaaagaacaaaccttccacacgacagaaagagactccatagggttactactgctggctcgggcagcctgcttttattcccttatctggccccacccacatcctgctgattggttcactttacagagagctgattggtccgttttgacagggtgctgattggtgcatttacaatccctgagctagacacaaaagttctccaagtccccactagattagctagacacggggtgctgattggtgcatttacaaaccttgagctagacacagagtgcccattggtgcattcacaatcccttagctagacataaaggttctccaagtccccaccagactcaggagcccagctggcttcacccagtggatcccacacccaggcgcaggtggagctgcctgccagtccccggccctgcgcccgcactcctcagcccttgggcggtcgatgggactgggcgccgtggagcagggagcggcgctcctcagggaggctcaggcatggcaggctgcaggtcccgagccctgccctgcggggaggcagctaaggcctggcgagaaatcgagcacagcagctcctggcccaggtgctaagctccccccaactgcccgtggccagcggggacggccggccgcgctgagtgccgggcccaccgagcccgccgagcccacgcccacccggaactcgggctggcccgcaagcgccgtgcgcagtctcagtttccgccggcgcctctagtcttgcttccctccagtccattcttcatgctacaggaagagtgagttttctggaatacaaatctaatcacaaccgttcccagctcaaaacctagcagtactctagtactggtgcctcagactaaaatccaagccccttgcttcctgaggcagagatgagtgtacgtgaatttttaaaaataaccatacagaaaaacagattctttgggatgtgcagttctgcgaatttttatttttatttatttttttgaggtggagtcttgctctgtcgcccaggctggagtgcagtggcacgatctcggctcactgcaacctctgcttcccgggttcaagtgattctcctgcctcagtctcccaagtagctgggactacaggcgtgtgccaccacccacgcctggctaattttgtatttttagtagccacgaagtttcactatgttggtcaggctggtctcgaactcctgacctcaggtggtccgcccacctcggcctcccaaagtgctgggattacaggagtgagccaccgtgcccggccttctgtgaattttaacacatgtatagattcttgtggccactgccatctattagtccccaaaacaacctcatgctatcctttcatagtcgtactctccctcatccctacccctatctttttaagaaggtcaaagaaatggaatgtgatcttttgaaaaacaaaaacacccaagccccttagggcgtttttaatgcccttgcctacctctcctccctgtcctccaacaactgccctcccaagccccacaatgcaactcgccggaactatgctcagttcttggggtgctccaagctgtcctccacttagccaagctccccacccgcttccgggggtgggtttccactgtgcacaacagtacctagcgcttcccccactacagccccctttcacgctgtggtaattgccaggttatctgcctctcccattacagttccttcctcacagggaccgcgtttaaaccacggcggtatccctaccgcgcaggatgggccgagccccgcacgccccgaggcagcaccccgcacgcagtagccgggcgtcgaggcgttcccagcccacaccaggcgcggacctacgaaggcggagcgagcatgcgcactaggaaggggcggggcggggcgcgcgcgatcccccgccccctgcacgcggtcccaggaggggcgggccttggccgctcgctctcccctcccccatgccgctgcgcttgcgcgctggggacaaccgttgctgggtgtcccagggcctgaggcaggacggtactccgctgacaccttccctttcggccttgaggttcccagcctggtggccccaggacgttccggtcgcatggcagagtgctacggacgacgcctatgaagcccttagtccttctagttgcgcttttgctatggccttcgtctgtgccggcttatccgagtgagtgacgggcctgaggaggcagcggaccggggacaccctgggggaacttcccgagctccgcgacctcgaagcctggcccttccttctccctggtcctacatgcctccctcccccactgtccggggtcctggcctcgacgccgaggggtgtccctctcctctcctggtcagggaacgcagcaactgaggcggcgcggcccagatgagacgggaagcgcctgcgggccgtgggcgcgggtggaaccccctcacctcaccggaggccttcctctgcccacccgatccttccccagccattgggcgtgtgaccgtgcaggggtcgtgtgacagctgctggccagctaggaatgatttttacattttcttcctttttttttaattattatactttaagttctagggtacatgtgcacagcgtgcaggtttgttacatatgtatccatgtgccatattggtgtgctgcacccataacttgtcatttacattaggtatatctcctaatgctatccctcccccctccccccaccccacggcaggccctggtgtgtgatgttctatttttgcattttcaaagtaaatatgaaatgtactctttcatgacttgtggaaaagcatgacgctcacatttcattgttcgtgaataaagttttactggcacaccaccacgctcattcctttacgtattgcccatggctgctttcccacgttagaacaacggggttaagtggttgccacacagtctggtctgcaaagactgaagtatttactctctggccctgtacagaaaaaaaggttgacccgtacggtaaaatttggagagcatgtggattgtgggtcgcggtctgggacactcacctgaggatgcgctcccagagagcatgcttgcgcacacggcattcaaagccttagttaagcaggattataacttaagacctgccaaggagcaatttttgtccctccccgaaagctgaaaaccaataaggtcaaattcaggggtgctaagactttactatattaacaatatcatgtgggcaccttaaggcacttagtatttaagtcaggtaggtgaggcttccccatttagtctaactgtagttcattgtggcatttagtaatgttggagtttggtttcacttaaatcaataaatacaatttaacaggtgtaaaaaaagcgctatcgtgcatgctgattatgcaaatctatttttcagaattgctaaacgatcttagttaaaaatcaaatttaaaaactgaaaatacaacacaatctaaattatgaatagtaatgggaaaagttctagatgaagttctaggtaactaaagttagctctttaaatactagcatttatgatttgtagctgtttttaataaaaagttttgtaaaatttttcttccttgacatagaggaccagaacataatgaagatgctactatcttttcttgatgtctgatgatcattattactaacaccagttattgcattttggtagttgtagatcagcaagtcacaagtgactaacatatatggagactttaactgaagtgactttaacactgtcacacagtacactctgggactgctaggtaggagtccctggacacccacttaactcagtgcagtctcttgcctaacaccataattttcccctccccctccccttcccttttcccccccttttttttttgcctgagacagggtctcactctctagctcagactagagtgcagtggcccgatctcggctcaccgcaacctctgcctcccaggctcgagggattctcccacctcagcctcctgagtagctgggattataggcgcacgccactaccgcctggctaatttttgtatttctagtagagacggggtttcaccatgttggccaggctggtctcgagctcctgacctcaaatgatccatccgcctcggccttgcaaagtgctgggattacaggcttgagccactgtgcccagccagcctgttgtctttcttagcaccctattccctaatctttcttgggaagaaagaaaagggttgtaggaaatgaaaagacgcttcccagaaaaaaggagtgattttgtgttgaatatatagatgttataagacataaggaaactatatacaggttgtaatcatagaagatgtcttggaatatgtaattacctttcttctacagaagtggattaaggaatatatagagcaggcagtggtacatggctgctttctctgtatctgtctctctactttttctctaattttaattttgtttttaaaataagtataccaaaatgcgtatatcattgagcttgatgtaaatcagctatgcattcttttatatggccactattcaaacaattgttggcgagatgcaaaagataaggtacataggtttttataatgaaaagtgcagctttgacacattttttctagactactagacagttttgaggttattacgcaaacatcacgggtgtattaagtaattgcatttattgaaaacctcagtacttcttgtatctgcctatacctttctaacaggcccaatccaagcttagctagtatttgtttaatctaaattcagttagacataaatgcagcttgggtatacagaagtcggcactcctttacatacacacacacacatcctgatggtgctggagaaacaacgttttactatataaaatttttatacattcagtttcctctacctgatttttccatagttttaaatactttgccatttttaaatttttgaatgggaaagtatttaatgtattccctctttaatgtatttgcactgtgcaacttactttactttttaatgagaattctttttgctttaaaaaaaaaaaaatgcacaggccgggcacggtgtcttacacctgtaatcccagcactttgggaggctgaggcgggcagatcacctgagcccagaaattcaagaccaggctgggcaacatggcgaaaccccgtctttacaaaaaatacaaaaattagccagatgtggtggggcaggcctgtagtcccagctattcgggaggctgaggtgggaggatcacctgagcccaggaggtagaggttgcagtgagctgagatggcgccactgcattccagcctggctgacagagtgagaccttgtctcaaaaaaaaaaaaaagcacagtaacttctaaagtaatattaacataatagttacatatttaaataatatcaactactattaaaattatataattggcctttttaaattttaagtcatcaaatattcatgggctggcagtgcaaactaattaaaattaaagtgtgttaatattaatttaatattaatatatgttaatttttaaatgattcaaactttgcataataagtataaataaaattaaaatattaattttggggtatctcccaaataaattatttcctctagatcatctcttggtatagactaggaaaaatagggttagtctaggattacaaaagctcttatttctagattggtattataagaaggctcaatgtatcagtctttggcttctgtcattgtgtttaggaaggattttgtcctaatgaaccacagaaggtaagggaaacaataaggcagcaaccagcaacaattgtttgaatctatcaccaaataaattaagaggaaaagaatattcttttatttcaaatacattctaaaggtaaagttcactgagttctggtgctgcaagttcacttagctagtgcccaaggctacagcatttaaaaggtctctcaaacctgtgaataaactgtcatgacacactttgttaatgtttgagataatgaggagcatgtcatccaataggcaagtgtcaagagagtattctgtgggggagtagcaggaagtttcattagcctgtccattgatgttttatgggggaaaaaagtcctgtctttctgttctgttgatcatattatcccttaaatggatatactttaatctcttgataatatatgtgaaattaaacttaagcaacattttttatctccaaataaaatactagttatttgaaaagaaaatattttcttttttttttagtatcactatatatttgaagcattttaaaaacacacaatttatttaacctaagtatagttttttccgagcctcaaatattcataccttgaccatttggagccattgtaagctgtcttctcttgttcttttgataggatcccatatatttttaaagacttcttgttttctgatgttaactgattgttccaagcccactttgtgtctttcccactctatctttctcactctgaatggaattaactgtctttccaaggggatggagaacatggtatgagagaccaaagtgcctgcgatacatactagactactgcagtggggaaatattgttatttttgtcattttagtgaacagaactagaagagaaagatttaaaataatgagtttattttggtttcaattataacattactcataggatgcatcttgatttttaactctttatccgcactagaattgtaacataatttaataaggctattttggttgtgtattgtggcaaaaatgactgctccccaaatttatcatttttcatgattctatgggttcactagactcagctgggcagctctgcttcatatggtatagctgaggtcactcatgcagctgcattcagctggaagttcaaatggataggaacatcccagatggcctctcatcctccagggtctttacatgacttctcatctttcagtactctagcccaagtttctttacaccatggcagcttgcttccaagaaggagatttataagccccaacatggatgctcttacgaagcctacactgtatcagacttgctaatgtcctataggccaagacaagtcacatggggcaagcccatatccaatgtcagaagacactacccaagaacatgaatagcaggaagtgtaaagccataaagttacatttctttaactggaacacttgattaatatgaacataattacttgtttatttacctgtcagcaaaaattaagatttgtgtaataataaattataagaaaattgctggatgaataagaagatttaatatttccttttatgaccattccttgagtacacctcagtaattaagcacaattattactactttgagttggaaatacagtactccagctcagttcgttttaaaattttaaccttcataaaagttcattttaatttgaaggtgttggatattttaactggtagttcttgcattattacagctttcagttattaattcttactttagtacttaactgctgtagaataagggaagtttattctttatgagtccacttcatggtatgtatagaaaatacaagcaatttgttctccaaagttatggacattcagccagagtgtgtggaccatctataagtgatggatgcttgggtatatgtttaagttttatatacatgagttctttatggataaagccattttgttttcactatcattgtaataaaaatcctagttatattcaaatctttaacaaaatgagcatccataattggtgattaaattttgggtgcaatcagcagttgccatatcaaggctactggccaagggcaaagtagaaatgtatgtgtatctacacaatgaaatattatttggccataaaaatcaatgaagtaccgatacatgctacaacatagatgatcttgaagacattacgctaagtataagaagccactcacaaaaggacacatatcgtatgagtccatttatatgaaatgtctagcataggcaaatgcgtagctacagaaagtagattagtggttgtccagggtctgggggataagggatatgggaaatggattttactgtgggatgacaaaactgttttaaacttagattgtggtggtgattgcaccactctggacatactgaaaaccattgaatttcatactttaagataaataaaaggtaaattatggaggtattttaatattaagattgtgatttacttacattaaaattatgtcaatgcagtattactttagagattgataaaattcaatgaaaggtaattagtagaacataagtttatgtgatctaaacttacattaggctatttagtaaggggcagttacaagaagtatgggggctctctgagaaatggagctatttcaccatgatgtttatgatgttattttatataaacttcacacttagaaatttagaaagacgtagtaagctgtgtcttttattataaaaaactgcttactttgcctaaaataaaagaacattcttattactcatttaaaattttctctgtaataattattggacaattagccagaaactgctccccacacaatagtttttagactaacagatttatttttaaacataacatgaagtctagttttcttcctctgtattcttctgtagaaatgttttacctgtgattatcttagtaagataaattactagaagtgcaattaatttacataccttccagcattctgttcattcattcagttattcatactttttgactgtctagtatggttctaggcactgggtaaaacagagtatataatgaacaaattagatgtgtcacagctctcaaagagcttactaagtgtaacagttaacaaatattaaactaacaaatacagttagaactgtctaaattctataaagaaaagatcagtatgctagagagagactaaagaaggatctagggatcaaaaggggagtaaggatggaacttattattttttttctttatttcttctaaaaaaaaaacaggatccatgtgtagaacgtgcagtttcttacataggcatacgtgtgccatggtggtttgctgcatctattggcccatcctttaagttccctcccctcaccccccacccaccaacaggcggtggtgtgtgttctccaggggctggggtataggggatatgggaaatgggttttattgttctcctctctgggtaggagggaacttattttactaaggaagtaacatatacacatgccagtcctaggttttatcatttaaaaatatttgcctacttgactggcaaaacaaaaattgtttttaatttgcatatcttttatgaacaatgaattttagcaagttttcatgcaaattggcttttatgttattctcttcctcctttaattggtcattctatgaaaaggaaatatatttcacatgtattatttattgagtgaagttttaaattttatttatttatctattattttattttatttttttgaaatggagtttcactcttgtcccccaggctggagtgcaatggcacaaccttggcttactgcaacctctgcctcctgggttcaagcgattctcctgcctcagcctcgagagtagctgggactacaggtgcatgtcaccatgcccagttaatttttgtatttttagtagagatgagatttcaccatgttggccaggctggtctcgaactcctgaccttagttgacccacccaaagtgctgagattacaggcgtgggccaccaagcgcagcctgaaattttatatttcattgctcattttaaatcatgattttattattttcctcataataaactcaaaagtaattaacttgccttttatttctgtgtgaacgggatgtatttttttgtaagtcattgattgtcagttacttgtactttgtagtaagaaaatactgtatttggattattttcaatattactagatacatcttaatatgcgaaagggatgcattttggtccatttgatgatagaacaaaatttggtcatatttaatttaatttaattttaatatttacatgtagtttaaaatattttggtccagttgacagcacaatttcggatactatatttatttatttgattttatttaatgttcacatgtattttaaaacagagtagtatccctgcagaataattttatcacaacactaatacagctttgccagcatccttgtgtcatttctttatgacaacattgtgtggttgttacaagcacctgctttgaagtaaggcagcctgtgttcaaatctcatccttacttataagttgaatataatcttaagcaaattgcttatcctttctaagtctcttccttttcttctttgacaaagtacttctcacagtcaaagctctgggtatagtgcctggcacatagtgatcattcaatcagtggaagctattaggatcttttaaatcattatcttccatttcccctttggatttcctaccacttttgttcctacagttatttagtaccattttgtttactttcttaccatttctgttgtgtgacagttcttcctgtactatttcaagaagagaagtgcaggcaacctcaggctcaccttcaggccccatatctgagattccagcaaaatctcaagcctgcttagcagttagccatcctgcttataagaggaactggagagcagcatcatggtttcccaagctgaagattcttacctgggccagagccatgttctaggacattgccatgtttgctttaatcacttactggtaaaaatagatgggatattataaagtataccagtgtagactatgaatatccaagtataataacacaacttctagcaagattgtctgttccttgtaagaatttgaattttgttcagctttctagcacctcctgaagaatggagaaaaacaggttttcacagtggccacagccatctgtagggacagttgaggctccactatcttttactaccttgacctacaaacatttttataaagatcaaattgatttgcaagagcagacctgattagtagaactgagaaggtcaacatgaaatagggagatgttttaggggacaaaagcaggaggtagaaggtgtgtggagagaggatggaattaacaatagaaaaatatggagccaagggtacatgaagaacagaggaaaatcgaggtaggaggtagtgcactctgttgctaggcagccaagaacaggcttttgggtgttgcctgagtaacaatagaaggggataataaatatttcagtttgttaaggaatcagctagtagtaagtatctccttttcctgtcctttggcactctaactcacctaatatccacctgggtatcttatttactactttgagaagaggcaagctaaatggttgaaaagcaagtgtttagcagcctataatctaatggcaatgtctttctaaaagcgttgaaacctttgttggttttacattttagatttacttattatagttgctcagaattaaaatctttttcagattaaaaaaacattttattacggaaaaatttaaatatgtacacaagtacaaagaattacataatctccacatatttataatagcttcagttattattactattattagcatttcagtagtttttggggaacaggtggtttttggttacatgggtaagttctttagtggtgatttctagctttagttattattaattcatgattaatcctatttcattgatagctctacccacattccttttcctctcacttccctggacactctccccaatttctcgggcttggattatgtagaagcgaattctagacatcctataattttatcagcaaatacttcagcatgaagcactaaaatataaggactttacaaaacacaaaacaatgtaattttttacttataaaaataattccttaatattatcaaatatctggttagtgtttctgattgtctttctctttttccagtttgatagaatcagaattcaagtaagatttatacatgtaacttattgatatacctgttaattctcttttaatctatagttcttcctccatctctgttttttcccttgcaatttaattgttgaagaaactgggtcatacatcctttagtttttcacagtctaggttttgctgattacacccccatggtgtagtttaatatttcccttattgtcctatatattttctgtatattgttagttatatctagggagacctactggattcagatttgacttttttttttttttttgcaagactacttcataggtggtgttgtgttcttccatcaagaaatacataacgtcggattttttgcctttttaggtatacatagccatagaaaattattgcaaaatgatcatattttaattataaacggcttctttaattattagctgaaatagtttacagattgaaacctttcttccttttgagctatttttccatatgcaattgggtctatttctatattttctgttctgctccattcatctgttcatggccaatgctatactatttttcataatagaggctttataatatatttaaatatttgattttaatatctgataaggctaggctttgttttcctggctgttcttatttgttcttccaaataaactttataataaaattttctaactccagaaaaaaattgacatttttagaaacatattaaatgtataaattaaaagagaggatatgacatctaagcatctttatgatgctgaatcttttcatctgagaacatggtatagctttctatttgttgatatttatgtctttcaaaagattttattatattcctgtattagtttactgtagctcctataacaaattaccacaaacttgatggtttaaaacagcaaaaatttattctcacagttctagaggccagaagtctggaatccatttccctgagccaaaatcaaggcatagactgggctatgctccttctggaaactcaagggaaaaatacgctccttgcgtcttctagtttctggtggctgcctacattccatgacttgtggccacatcagtctaatctctgcctcttcctccacattacctcttcctcttctgggtgtgtgtcaaatctctctgtgtctatctcttataagaacatttgtgactggatttagagtccacccaggtaatccagaataattgccccatgtcaagaaacttaatttaaccacatctgcaaagacacttctttcttaaggtaatatttacaggttctagggtgatatctttgaatattcattatttagcctactataactcttcatattgattttggcatgtttttaatattttatggttatgtatatatataatgccaggctgcagtacagtggaaagatcatggctcactgcagcctcagcctccctaggctcaagcaatcctttcacttcagccttcccactagctgggaatacaggtatgtgccaccatgcccagctaattcttgtacttttatacagttggggtttcaccatgtttcccaggctggtctcgaacccctgggctcaagccatccacctgcctcggcctctcaaagtgctgggattacaggtgtgaatcactgcacacagccaatattttgtttcattttttctgttatgtaaacaacatcttatttcttttttttttttgagacggagtctcgctctgtcgcccaggctggagtgcttatttcttatatcttctaagcagtttatatttatatattcattttggtatattgatttttatgacttgctatttatgaaattctcttactaattgtagtagcttttcaatggattcttttgtgttatctgtatttataattctatcatctgtatgtaaacatagttttacctctttctgtccaattcttatgtctccaattattttccctcatctaattgcattgactagtatctccaacatgatgttaaatattaacagtaatgaagatattaggtattcttatcttgttcctgtctttagtggaaaagcttctactgtttcccactaaataagatacaaagtatattttaatgttctttttagggaacatgtttttctatataattttaagggaaatttatatttaaaatgagaaatgtaagcagttacctttataaagaataatatcttattagtgatctgtagctttgaaagtgttttaaaatatctaatttatttggttcagtgagataaaaaggcaagtgtagtatcttagctttatagttaagtgaatatccagataagttaaataattacctaaggtcatgctgctataaattggtagagccaggaccaggatcaaatattttattttcactgcacaaggcatattcattttactcaattattttccttcatgaagactctgattcaggacaatgcattttatgagtttacataaataagttattttcctttttaaaatgtgatttttatacaattttggtttgccattaaaaaataaaggagaaaaaattcttgaaacttaaaaaaataaatgtgacttataatggtttactatattaaatgattggtgtgtgtgtgtgtgtgtgtgtgtatgtgtgtgtgtttagtgagtaaaacattatagttaaagtctaaagtctcctctactgaccaaattgagtcccactgcctctccttagaggcaactgcccatatgagtttagtacattatcattacagtccattaaaaaaatctgcagttcacagacaaaatatatgatactatgtgagtgatttttaaaaagtattataaggataacatcaaactctatgttttatgctttctttttcacttatcatcatcatatggatcttaggagtatacaaggtttttctaagcattacataaaatgcagaatttacttttagaatcaagacctccagacgtgtggtatctttccactaaccacattggctcactaaactgttctcattaagaattttttaataatcagctgtggaatctagtgtaatttcattgatcagcatctgtttttgaggtgaaatgggttaatataaattatatctgttttctcattgggcgtaaatgcagaacttccacctcaagcagccaccccctgattttacagtttttgggggttcattttgtttggggctcttttctgatggctgttctgttcaaaaccaatctattctggccactgttaaaggtttatactctctgtgaataaagtaggaatatgctagcagtacgaaagagattttgtaaaactgttaatgctaattacaaatggtgcttctagtaaataaagctggcctccttaaaactcaaaaaaaaaaagaattttttaagatttagaaatatgccttcaattttgattaaacgtcgatctggtctttctaagttgtaacagaataaagaagagaggagaaacatgtaaatacaaagcagtttttgagtattttgtgcttaccaaaaagctaaataaaagtgcctcctgaacagaaagtttactttatttagcctgcagggggatggttcaggtaggcgtaatgcattagtgtttggtaaaaagtgatttacttccctgaattaaatcaatttgtatacttgaaaatggcaaaccttaaaattgcccatggtaaaaaaccatagcacttaaaattaaaataccctggttcaggagtagttgaacagaattccagaatatcttaatatcttactatcttttctgttctccacgttggaaatgagaggctttactgctcagatgctgcaaaataggagtataaatagaactaccttttttttttttttttgcttatcaaaatattttattttaggagacccctcaaaaaaagactctccacattagatagacgccccaacaatacccttgggctttttttgtcttttctgtattttttcttttttaagtcaactaaaacaatttgatgcttaaaataaaagacaggaaatatttcctgactagactttagtcaagaatatatatatatttttgatccgggggcaggtgaggagaaggaaggtgctgccagcggttcatgaagtagaactaccattttgttgttaagagtgaaatgctgatgatttagaccaggaactcacaaactttttctgtaaagggtaatatagtattttcagctttgcaggccatgtggtctcttacaattactctagtgttgcaggcaaaagcacctgtagataatacacaaacaaataggcaagactcattgggttccaataaaacgttacttactaaaacagttgagtggatatgagtcacagactatagttagatctttgttgggttgaaggcagtagtatactggtaaatatttaaaactggcttttcggagagaggaggaaactctgatttgtagcatttgctcatttacatggcgtagatactccaaccatggttgatttcaaactaccaagttgacatcactgagcagggaggtagagatgcacagtagcacaccattatatgcattttcatcatacagatacactagatgtaaataacctcacaagcatagaaaatagtaaaataattagaaagtgatgagtttgggatatttattacctttgcttttaatataatttatttgattgtaaatgtagataagttaattgttaaataatgtctgtgtttaacatctggctcacaaaattcataaaaatttaacaatgggctctagtcaaccagtataagcctactccagcacaccactgtgttagaggacataatcaagaattttcgtttaataagttgcctgttgaatcataagttatatgggagaataaaagcaaaaatatagagagaatggtgttaatatgcaacttttgcactaatcttgctcaactgttttaataagaacctgaagaaataattttgtttatttaagtgaaagttgactctgtgtcaaaggtgctttgcatattggttctttatttcaatttttaagtgatagcatatgaaataaattttggtcagtagattctgtcagtgtgtcatatataataataaatgttacttattatttatttgattttttccctgaaggcataactgtgacacctgatgaagagcaaaacttgaatcattatatacaagttttagagaacctagtacgaagtgttccctctggggagccaggtcgtgagaaaaaatctaactctccaaaacatgtttattctatagcatcaaagggatcaaaatttaaggagctagttacacatggagacgcttcaactgagaatgatgttttaaccaatcctatcagtgaagaaactacaactttccctacaggaggcttcacaccggaaataggaaagaaaaaacacacggaaagtaccccattctggtcgatcaaaccaaacaatgtttccattgttttgcatgcagaggaaccttatattgaaaatgaagagccagagccagagccggagccagctgcaaaacaaactgaggcaccaagaatgttgccagttgttactgaatcatctacaagtccatatgttacctcatacaagtcacctgtcaccactttagataagagcactggcattgggatctctacagaatcagaagatgttcctcagctctcaggtgaaactgcgatagaaaaacccgaagagtttggaaagcacccagagagttggaataatgatgacattttgaaaaaaattttagatattaattcacaagtgcaacaggcacttcttagtgacaccagcaacccagcatatagagaagatattgaagcctctaaagatcacctaaaacgaagccttgctctagcagcagcagcagaacataaattaaaaacaatgtataagtcccagttattgccagtaggacgaacaagtaataaaattgatgacatcgaaactgttattaacatgctgtgtaattctagatctaaactctatgaatatttagatattaaatgtgttccaccagagatgagagaaaaagctgctacagtattcaatacattaaaaaatatgtgtagatcaaggagagtcacagccttattaaaagtttattaaacaataatataaaaattttaaacctacttgatattccataacaaagctgatttaagcaaactgcattttttcacaggagaaataatcatattcgtaatttcaaaagttgtataaaaatattttctattgtagttcaaatgtgccaacatctttatgtgtcatgtgttatgaacaattttcatatgcactaaaaacctaatttaaaataaaattttggttcaggagtttgtagttttttctcattaattttaaatgttgtgaagacctttacgatgtttaagctttgattttacttgaatagattagttaaattcattcattttatgagttaagagactgtgctctctctcactctatagctagttttaaataaaataattctatagacatacagtgtaaaattttggggcatatggtctttcttattctttcagataatctgagttgtcttttttttttttgagacagagtctcagtctgtcacgcaggctcgagtgcagtggtgcgatcttggctcactgcaacctctgcctcccgggttcaagtgattctcctgcctcagcctcctgagtagctgggattacaggcacccatgaccacgcttggctaatttttatatttttagtagagacggggtttcaccatgttggccaggctggtctcaaactcctgaccttaggcaatccaccctcctcgggctcccaaagtactgggattacaggcgtgagccagtgcgcccagcgagttttctgtcttaatagcataacttggagcttgtatctgcacttttatttggatataggtgtgcctcctttaaaatgtagatactatattaagatacatctctattcttttgtcattaagtacttttggagtatcaatgagggactgtaacctggatatgtaatgaagtcattctcatttcctttctttgtgtacatacacattgaagattttcaaatcttttgtcaagagagtatgactgacaccattaaggttaactgtgtagtattataataatggctcaggtaattctgtttatgatttgaccagtattatattcaaatacatttatttatttgttcatcaagacattcatttatagtttgataaagatttattgaccttttactatgtgcaggacacaatagatgctaggctttggggatacaaaaataagacctactttcttttctctttgacattatattatagcgggaaagatacacactaaacaaataatttcaagaatttttaaatttcagttgtgacaaattattatgaaggtgtgaggtgtttgacctcacttagaccaagaataatgggaaagctaccctgagaaagtggcaattaaggtatagtctgaaagattagggtgtgtgtaaggagaaagtgaacattccagggagagggaacagcaggtatgaatactgtgagttaaaaataaggatgagaagttcaggaagtacctggagtatagaaaggcaagaaagagcatcacaagatggatctggtgacatatacaccaggtcagaatatatcctgtggcgccttcagtgcgttattaaatgttttagcctttaccctgtgatcaatgagaagccattagtggattttaagcaaaaaggactagtatgttcaaatatctgttaacaacaaccaaacccactcgctgcagttttggaagtgggcaaaagtagaagcgcactgtgcacaggccaaatgttgcttggagtaggtggaaagaattggcaattaagagggagaatcaggccgggcgcagtggctcacgcctgtaatcccagcactttgggaggccaaggtgggcggatcacctgaggtcaggagttcaagaccagcctggccaacatggtaaaaccccgtctctactaaaaatacaaaaattagctgggcgtgatggtgggagcctgtaatcccagctacttgggaggctgaggcaggagaattgcttgaacgtgggaggtggaggttgcagtgagccgagattgcagtgagctgagattgcagtgagccgagttgcagtgagccaagattgcgccactgaactccagcctgggtgacagagcaagactgttttgggtgggggggggaagagggagaatcaacaagatttggtgattgaatggatatggggactgtgctaatagcagggaccaaaaataattcccacaattagttgtattgtaaaaagtattatatataggctttgtttactaaaaatactcttttactgttatttataaaataattttactttggaaaatttcaaaaatttgcaaaagtaaagaataatataatgaatccatgtacatgtcaaccttaaaaaaagacctcatagagacaagctctctgaaacaaaagattttaattgggaataaaaaagcgttgcaatttagggtacacaagccatgaaaatcataagcacacacaccaggaaaatcaggacaaagggagtttttaaagcaggagtccacacaaactgctttgaaacaaagctcactgcaggagataggccttggtaggcgcctgtcctggtcagatcatatcagaaatgctgaaggccaaggaaatgcctgagaataagctctgattacaggatacatccaagatgtataggtatttcaagaatgtaagcaggaggattttttctttatgacctccccagctcccatttttgattagggctttgacataagtgactccattttgttattgttcacttccacatacccatcatctagtctcaacaatcatctaaagactaatcttctttcatctatatccctacccctttcccctcttcctattttatgttgaattaaatcacggatactttatcatttcatcagtaaaaatataacaatgtgaagctctgtaagttttttttttaaaaaaaaaaaaacataaccacaatatcacacataaaggtttaatgatttctggctgggtgcagtggctcacgccagtaatcccagcactttgggaggccaaggcaggaggatcatttgtggtcaggagttcaagaccagcctggccaatatggtgaaaccctgtctctactaaaaatataaaacatagctgggtgtggtggtgcatgcctgtcatcccagccactcaggaggctgaggcaggagaatagcttggacccaggagacaggttgcagtgagctgagatcatgtaactgtgctccagcatgggcaacagagggagactccatctcaaaaaaaaaaaagtttaatgatttttactatcatcaaatatctagtcaatgttcaaattcccaattgtgaaataatttttaaaatttagggtttatatgaatcgagattaaataaagttcacacattaaaattggttgatttgactaataagtctcttttaatctaaagtattcctttatacctcttttttttcccctttaggtttatttactgaagaaattggtcatttgtcctatagtttcccacaatatggattttgctaattgcatccccatagtgccatttagcatgttctcctatcctctatcttttctataaattggtagttggatctagagaggcttcatcaaactgaggtttttttttttctttctctttcttcttttttttttttttttttttttttggcaagatgctgttttattcttccatatggttgggtctctttttgtatttttagcagacttttatggtcattgcctagatagattaattgatcaggtgatacaaagtagagacatcattccttccattattatctggaatgtgtctataaagagaaactttcatctattatttgattccccagtggtctagtgtgtattggaaagacatcaaatgcttgaatccctttgcttaataatttccagaataattagttcatagaatctccaatgatactctattttattagtagcctttatttttttcaaacaattttagttttacagagaaattgatcagaaagtacagagttctcacatccgtctctctcctccctgacacatcttgtattggtgtggtacatttgttataattaatgaacctacattgacacatcatcatcacctaaactccatagtttatactaagattcgctcttggtgttttacattttatgcatttggacaattgtacatgtgtccaccgttatagtatcacacagagtagtttcactgccctaaaaccctctgtgtttcatctattcatgcctctctctcccctaacttctggctggcaaccactgcttttttttttttttttccataattttgccttttccagaatgtatatatagttgagtaacttatttgaaatgtgtaggaccagaagtgttttgaattttgtttttttttcagattttggtatttgcatatacataatgagatatcttggggataggatccaagtctaaacatgaaattcatttatgtttcatatatagtttatgcacagagcttgaaggtaattttctatagtacttttaataattttgaacatgaaataaggtttgtgtacatgacccatcagaaagcaaaggtgtcaatatctcagccacccatgtggacagtctgtggttacttagcatcactatcatttctgactctgaatttatttgctactgataagcgattattttcttacacttatgcacacataagtacttgacagtaaaaacatgacatactattaatacagtgaaaaaataatgtgtcagttgtggaatttttcacttgagatgtcctgtcagcattcaaaagctttcagattttggaacattttggatttttgttttgttttgtttttttgctttttgttttgagacagagtctcactctgtttcccaggctggagtgcaatggtgcgatcttgctcactgcaacctccgcctcttgggttcaagcaattctcctgcctcagcttcctgagtagctgggactacaggcacgtgcccctatacctggccaaattttttttgtgtgtattttttttagtagagtcagggttttactatgttggccaggctggtatcaaactcctgatctcaagtgatccgctggcctcggcgtcccaaagtgctgggattacgggcctgagccacagcgcccagcccattttggattttggattttcagattacggatgctcagtctgtagttggaatcaatgcagtctgtagccttttcagactggtttctttcatttagtaatacacatgtaagtttcctctgtgtcttttaatgacttgatagtttatttctttttggtgttgaataatattctattgtctagatgtaccacaatttatttattcattcacctactgaaggacatcttggttgcttctaagttttgacaattatgaataaagctgacgtaaacgtttatgtgcaggtttttgtgtggacagaagttttcaactcctttgggtaaacaccaaggagcatgattgctgaatcatacgtgatacggtttgaatgtgtgtcccctctaaatctcatgttgaaatgtgattcccaatgttgtagatggggcttggtgggagatgactggatcacaggggcagatcccttatgaatgatttagcatgatccctttggtgataagtgaactcttgctcagttagttcatgtgagatctggctgtttaaaagtctgggacctcccctccttgctgtcttgctcccactctcgccatgtgatatgctagctctctgtcactttgtgccacgattgtaagctccctcaggccctcaccagaagtagatgcttgcactacacttcctgtacagcctgtggaaccgggggccaattaaaccttttttcttataaattacccagcctcaggtacttctttatagcaatgcaagaatggactaatacaacgtggtaagagtatgtttagctgtgcaagaaattgccaaactgtcttccaaagcggctgtaccatgtttgcattcccaccaaacgaatgagagtttctgttacttcacatacccgccagcatttagtgttgttagtattctgcattttggccattctagtaggtgtgtagtgatatcttattgttatgatctattgctttttaaccttattttgtgatatagattcacatgtcttatagttgtaaaaaataatgcagagagatctagttaaatgtaccctttccctatttcacccaaatgtagttaaattagagtacaatataacagccaacatatagatattggtacaagatacagaacatttccatcatcataaaaatctctcatgttgctgttttatagccacaccacttcccccctccctgtctaaccaccggtaatcactattctgttctccatttccataattttgtcatttcaagaatgttgtatgaatggcatcatacagtacataatctttttgggactaattttttttcattagcttaactctctagagatttatcaagatttttgcatgtatcaactcattcctttttattgctgagtggtactccacagtttaaccatttacttgtttcagaatttctggattgtttccatgtcttggctattagaaaagaaaagctgctgacagaatgggagaaaatatttgcaaattatatatctgatacagattatatataatctgacattcatatacaggtgtttgtgtgaacataagttttcatttctctgggataaatgcccaggagtgccattgttgtgcagtgtggcagttgcatattcagtcttataagaaactgcccaactcttttccagagtggctgtaccatttaacataaccaccagcagtgtatgagtttctgtgtgcttaattctgtgtgctgaaatttattatggattcttgcatgtattaatgagggatattggcctatagttttctttttgtttttgtactgtccttctctggttttggtatcaggatattatctttatcaaatgaattgaggagtattcctctctcttctattttatggaaaagattttgtaaattggtgttaattcttctttcaacatttggtagaatcatcgccagtgaaccatctgggcctggaggtttctgttttgagagttttacctctataaattcaatttccttaatagttttagggttattgaaattattttatgttaggtgagatgtaactgttcatgttttttgaggaattggtctattacatccaacttctcaaatttatgtttttaaagttgttcgtaatattcctttttatctttttgatgtttacagtctttagtgaaataacttgtttcattcctggtaataatttgtgtctttcttctttttacctttttcagtcttgctagaggcttgtggattttatcttttcaaagagcaaaccaataaaaatttgtttcattaatttttctttattgttttctgtgttaaattttattgatttctgctctttatcatttcattccttctgcttgctttggggattttgctcttatttttctaggttcttggtgttagactttttctcttttctaatgtatgaatttaacactatacattttcttataagcattgttttttccatgtcttataacttttgatatgctgtattttcttttccttcaatttaatgtatttttcattttatttaatgacgttgaactttttgtttgcctattggccatgtgtacattttcctctttgagacttcctctttggcccacggattattttaaagtatgtcatatagtttctaagtgttgggggagtttactgtaatccttccatcactgatttctagtttgattctattgcagtcagagaaaaaactatatatgatttaattcttttaaaattgttaaggttcatttatgatccaggatatggtatatacgtatagaaaataatgtatattctgttggttggaggattttataaatgttaattagatcctattgtctgttgttgatttattctgtaatctttctgattttctatcaattgttgaaagaggagtgctgaggtctccaactgtaattgtggatttgtgaatttttcctttcagttctatcagtttttgcttcacatactttgcaggtccgttgtttattgcatgtacatttaggattgttatgtctttttgatggactgaacatttaatccttgtataatgtccatttatgcctctggtaattttctttgttatgaattctaccttatttgatattaatatagccattcttgctttcctttgattaatgtttacttgatatattgttttttatccttttactttcaacctgcctatatcattatgtttgaagtgagtctcttgtagaaagtgtaacctgggtcatgttttataattcattctgcaatctctgccttttaattgggccatttaaatttagtataattactggcatattagggctcattttgctattttagtttattttatttttgtttcatgtttgttctctctgatttttgtttctctgttttctctttcctgccctccagtggattacttgaacattttttggaattttattttgatttatttatgttttatttgaatagatttgtagcagttactctaggtagcatattacatatacataacttaagacagtgtactggtgtcatcatttaacagtttgagtgaagagtagaaaccttacctctctttagatccctttatcctctccaacttagaattgtcttaactatttcctctacatacatttagaaccacatcagacaggattataaattttgatttaacatcaaacataatttagaaaacacaaaagtaaagaaaaatctattgtatctactcacatttttgctctagccattattttcttctttatgttccacgactccttgctttatgatttctttctcatatagaaaacttccttatccattcttttagtgtagatcttccagtgacaaattcccttagttttcctttgtctgaaaatatcttaatttattctttattcctgaaggatgtttttacatgatatagggttccaggttgatctttcctttcatcaattgaaaaatgttgtgctacttttttccctgccttcatggtttttgatgagagatccactgtcatttctattgctttttcttattggtaaaatgtaatctctctctcactgctttcaagggttttttttttctctgactttaattttcagaagtttggatataatgtgccttggtatggatttctttgtatttatcctgcttgagatttgctcagcttctggaatctgtaggtttatgccttttgccaaatttagacactgtatccattcttttgaggatgttttcaactctttccttttctcctctttttatgaaactccagtgacatgaatggtagatctttcattatagccccttgggtccctgaggctcattccattcatttttgctcccaaacttttcccagtctattttctctttattgatcagattgggtaatttctattgttctatcttcaaggatacttattatttcatctgttctccccatccttctgttgagcacatccactgagctttgtatttcaattattgtatttttcagttctaaaatttccatttggtacttcttttttttttttttttttttgagatggagtctcgctctgtcacccaggctggagggcagtggcacaatcttggctcactgcaacctccacctcccgagttcaagtgattctcctgcttcagcctcccgagtagctgggactacaggcacatgccaccacacccagctaatttttgtatttttagtagagatggggtttcaacacattggccaggctggtcttgaactcctgaccttgtgacccacccgcctcggcctcccaaagtgctgggattacaggtgtgagccactgcgctcggcctggtacttctttatatttcctaattctttgctaagactctatttttttgggggaggggaagtttttatactttttaatggatttcaagcatgtttataattgttcactgaagcatttttatgatggctgatttaaaatctttgtcatataattcaacatctctgtcatcttggtgttgacatctattgattattttctccattgagtagtggtaaaaatcctggctcaccattagggctcctctgatactactgtagtggtgagggggaggaatgactcattaaggctgggtgggggtgaaagtctaggcttttcacctggtcttcactaatataaagtggagaattcatacatccaacagagatgaaagtcctgtatccctactcagccttctccaacacgcccttacagcttggtgagtatggaaatctaggttcccaacttggcttttgctagtgcggatggagattggatgggggtcacagtttttctgtagtgtttggctggaatagaatggttactgtctaaaagttttctgtgttgtccccgatccctctctcaatcctttggctagagggaagaggcttttgttggggattttatgtctgtgcctgttcatgtttctgggttgtcagcttctctagctccaagtttgggatatatgaggctaaaagaaaattcagagaatgcaccaccgtgtcattccttgggttcagaagtctttagccagtttggctttttttcttcaccttttacagttatcttatatttgttttatatataatatgcaggacctttatttgtatgttggagattgtactttattcttaagacaatgaacatattttgaaagattttaagcattttttgcaagtcactttaaatggcttcagtgtagataaaggaaaggaaggagcaagactgagagtagaggccagttaggagactgtcataaaaatctggtgaaagatgatgatctcctggacttggatggtaacagaggagatggaaataagtagtaaatttgagagatatttaggaattaagaaccaagaatttggtgattattttgttactgtaggtagttagacatgaacagggtaggaaagccctctcccgaccccaccaggaatgtcaggcgaccattagatgatggtcaggtggttgttaaactgtctctctaaaataatacttggttgcaaccagtgccgggaaaaggcattctcccagtagatagaaaaaacctgacactggtgatcagcaacttcccagcaaaatctcaagagctggggaagtgggctcaagtatgtgcactaagaggtaacatgatggagtttaaacactcgacaggtaagggaaaaacacctcgactgagtatgtgtacaacttcagtaatcacacttagtatgtggcccctctcaagtgctggcaggccactgcacatgtgcatgacccacccccagagaagaatcaaggaaggaggaaagaagaccccagagccatgccagtgtataaaaccccaagtcaagggctgatgaagtcacttggatctctcaagttttctccttggccctcttacaagtttacttccttttattcctgctctaaaagtttttcataaacgttcacgcatgctctaaaacttgcctcagtctctccttctgccttctgtccgctggtcgaattatttcttctgaggaggcaagaattgaggttgctgcagacccatacgattcactgctgctaacaatttgatgtgcaagataaagaaagcggtaaggaataacttctgtttccgacttgagctactttgtgggtggtagtgtaccttgtcttttttatagcatgtatcaacattgtattataattttatagttatttatatgattatttgtttaatgtttgtctctctttaccagattgtaagtctataagagaaggagtaataagaattttgttcactgctgtactctcagcagctagcacaatgtctggcctgtaattatatgctcaataaatattaatgcattatgatatatttaaaaggggaagcatgcttatggagaagatgattttagaaatctcatttttgaatatattaaatttaagttgcctatgagacatatccagttagatatattagtctggagcttaagagatctacaaataacgattttggagctacctggaagctaaatggagctatctggaagctaaatggaaatttaagctattgcagtggagacattctttatagagtgtacagagaagaggagaagacctagaactaagctttaaatatctctaatttagagggaaaaatgaagaaaagcacctaccaaagtgaccaagtaagaatagttagaaaagtgcttaaaaatattaaaacatttgaaatatttctcctgtatttaaccacaccaggaaaagtgtggttaaatagatgtcaaaggaagaaagagtgtttaaaaaagagggaggatttgacactgttgtaactcaaaaatcaaacgagataaagactaaaaatcatccactggattagtgcaaaaacggttttgataggtttggagataagccatactggaagaatgagttaaggtaagaaaatggaggccgggcgcagtggctcacacctgcaatcccaccactttgggaggccgaggcaggcggatcacgaggtcaggagatcgaaaccatcctggcaaacacagtgaaaccccatctctactaaaatacaaaaaattagccaggcgtggtggcgggcgcctgtagtcccagctactcaggaggctgaggcaggagaatggcctgaacctgggaggcagagcttgcagtgagccgagattgcgccactgcactccagcctgggtgacagagagagactccgtctcaaaaaaaaaaaagaaaagaaaatggagacaaaaagtagagacaattcttgaaatatttaagtgactagaatgagagaaaaaggtgatgggggtggggggaatgtaaagcccagggagaatattagtttgttattttcagataggtgagactgagaggtgaagccagctggacttctaggtcaggtggggacttggagaacttttctgtcttacaagaggattgtaaaatgcaccaatcagcactctgaagctagaattgtaaaacgcaccaatcagtgctctgtggctagctagaagtttataaaatgtaccaccaatacattgtaaaacataccaatcagctctttgtggctagctagaggtttataaaatagaccaatcagcacactgtaaaatggaacaatcagtgctctgtaaaatggaccaatcagcactctataaaatggaccaatcagcaggacatggacggagacaagagaataaaagctagccaccccagccagcagcagcaaccggctcaggtccccttccatgctgaggaaggtttggtcttttgctctccacagtaaatcttgctgctgctcactctttaggtccacaccatctggagccctaacaccgcaaaggtccgtggcttcattctttaagtcagagacatcatgaccccacccgaaggaaccaactctggacacgagactagaccatgtttagcagctgatgagaaagagccagtagaaaaggagaggttgaagatggggtgcagagagtaataggagggaaggagaagaaatgaatacagataaaggtaagtctgaaggtttggtagcaaaaattgaaggaattccagattgtagcttctaaacatttttttaacggtgtagaaattgatatctgttcagattaagttataaggtttaaaaaaagacagcatatatgaagggcctagcatgtagtaggtgcttaataaatagtagctttgtgttacttgcagttttagaaaggttttgtatgattatagcattagtacagtataatgtgatttgagaacatttaaaatattttctttgtaggtctgccaaagtgcttgaaactcaactttgagaaagtggttacattggactaaagcattgtaaaatactgctttatctgttttatttgttcatattttggtgagatgcattactttattttattatttcaatagtttttggagtacaggtggtttttggtaatgtggttaagtcctatagtggtgaattctgagatcttagtgcactcgtcacccaagcagtgtacactgtacccaatatgtaatcttttatccctaactcccctccatgtcctgctccccttggcgtccccaaagtgcattacattattccgtatgtcttcatgtcctcacagcttagctcccacttataagtgagaacatagggcatttggttttcccattcctgagttacttcatttagaataatgacctccagctccattcaggttgctgcaaaagacattattttgttcttttttatggctgagtagtattccacgatgtatatatgccacattctctttattcacttggcacttaggttggttttacatctttgcaattgcacatcttgctgaggtatccatgcatgtgtgtgtgtctttttcatgtaatgactttttttccattaggtagatacccagtagtgggattgctggatcaaatgctagatctacttttagttctttaaggaatcaccatactgttttccatagtggttgtactaaattacattcccaacagtagtgtagaagtgttcccttttcaccacattcacaccaatatattgttttttgactttttaattacggccattttaaaaacaaaaaaaaataattttggccattctttctggagtaaggtggtatctcactgtggttttaatttgcgtttccctgatgattagtgatgctgagcatttttccatacatttgttggctgtttgtatatcttcctttgagaaatgtctattcatgtcctttgaccacttttagatgggattcttttttttttctttaatgcagtgttttaaaatgtagccaacttcttgtttagttcctagttaaataaaacccttaaaaagggttttttaaactgacaaaaattgtatataattatcatgtataacatgttttgaaatatataaacatggaagagaattaaattgaggtaattaagatatgcattacctcacacacttatttttttgagatgagaacacttaaaatctactctcttagcaattttcaagaatgtaacacattattgtttaaatctcctttgatgctttcctgcaggttcagccttgccccagtcccttcctcttctgttttttgaatttgtgaaggattagtgttaattcatgcttaatgtttgggtagaattcaccagtgaagccatctggtcctgaacctttctttcttgagaggtttttggttgctgattcaatctcttggcttactctatgtctgtcaagatttttatagcttcaaatcttacggttaagtctttaatccatcctgagttaattttttgtatatggtaagagataaagatccagtttcattcttctgcatatgactagccattttttccagtaccatttattgaatagggtgtcccttcctccatttgttgaagttggttgtaggggtgtggcgttatttcagggttctctattctgttatttttgcttagtactgctttggctatttggactcttttttggttccatatgaattttagaattgttttttctaattctgtggaaaatgatgttggtggtttgatagaatttcattaaatctgtagattgctttgggcggtatagtcactttatcaatattgattctttctacccatgagcatgggatgtttctccatttgtttgtgtcatttacaattacttttgtctatattttgaggttctccttgtagatgtctttcacctccttggttaaatgtatttctagatattgtatttttttgtggccattgtaaaggggattgagttcttgatttggttcttagcttgagcattgttggtgtatagcaatacaattggtttttgtgcattaatttggaacctgaaactttactgaagttgtttatcaggtctagaagtcttttggaggaatctttggtttcctagtttggtataagtttatgtcattcggcaaacaatgataaattgacttcctctttttctatttgggtacctccttttatttctttgtcttgcctgattgccctggctaggacttccagtactatattgaataggagtggtgagaatggatatccttgccttgttccaactcttaggaggaatcctttcaacttttccctgttcagtatgatgttggttgtgggtttgtcatagatggctcttactattttaaagtttgttccttcaatgcccagtgtgttgagagtttttcttatgaagggatattggattttatcaaatgctttttctgcatttattgagatgatcatatggtttttgtttttaattctgtttatgtggtgaatcatttattgacttgcatatgttaaatcatccttgcgatccctggaataattatcgtgatgaataattttttcattttattttattcctttattttttgagacagggtctctccctatcctgggttggagtgcagtggcccaatcagggctcacagcagccttgactttgtgggcttgagtgcttctcttgctttagccccccaactaactgggactacaggcatgtgccaccacatccagctaatttttttgaattttagtagagatgaggtctcactatgttgtccaggctggtcttgaactcctgagctcaagcaatccttctgcctttgactcccaaagtgctgggattacaggcataagccaccatgtctggctatgatgaatgatctttttgtgtgcttctagatttgctttgctagtcttttgttgaggattttgcatctatgtttattacagatactggtccgcagttttctttttttgttgtgtccttgccagattttggtatcagaatgatactggttttataaagtgagttaggggaatccctcctctctgattttgtgaattgtttcagtaagattggtaccagctcttctttatatgtctagtagaatttggctgtgactccatccggtcctgagctttttttagttggtagattttttgttttttttttttattgatcattcttgggtgtttctcgcagaggggtatttggcagggtcataggacaatagtggagggaaggtcagcagataaacaagtgaacaaaggtctctggttttcctacgcagaggaccctgcggccttccgcagtgtttgtgtccctgggtacttgagattagggagtggtgatgactcttaacgagcatgctgccttcaagcatctgtttaacaaagcacatctttcaccgcccttaatccatttaaccctgagtggacacagcacatgtttcagagagcacagggttgggggtaaggtcccagatcaacaggatcccaaggcagaagagtttttcctagtacagaacaaaatgaagagtctcccatgtctacctctttctacacagacacggcaaccatccgatttctcaatcttttccccacctttcccccctttctattccacaaaaccgccattgtcatcatggcccgttctcaatgagctgttgggcacacctcccagacggggtggtggccgggcagaggggctcctcacttcccagtaggggcggccaggcagaggtgcccctcacctcccggacggggcggctggccgggcggggggctgacccccccacctccctcccggacggggtggctggccaggcggggggctgacccccccacctccctcctggacggggcggctggccgggcagagggactcctcacttcccagtaggggcggccgggcagaggcgcccctcacctcccggacggggtggctggccgggcggggggctgacccccccccctccctcccggacggggcggctggccgggcagaggggctcctcacttcccagtaggggcggccgggcagaggcgcccctcacctcccggacagggcggctggccgggcagggggctgaccccccacctccctcccggacggggcggctggcctggcgggggctgacccccacctccctcccggacggggtggctgccgggcggagacgctcttcacttcccagacggggtggctgccgggcggaggggctcctcacttctcagacggggtggttgccaggcagagggtctcctcacttctcagatggggcggccgggcagagacgctcctcacctcccagacggggtcacggccgggcagaggcgctcctcacatcccagacggggcagcggggcagaggtgctccccacatctcagacgatgggcggccgggcagagacgctcctcacttcctagatgggatggcggccgggcagaggcgctcctcacttcctagatgggatggcggccgggcagagacgctcctcactttccagactgggcgccaggcagaggggctcctcacatcccagacgatgggtggccaggcagagacgctcctcacttcccagacggggtggcggctgggcagaggctgcaatcttggcactttgggaggccaaggcaggcggctgggaggtggaggttgtagcgagccgagatcatgccactgcactccagcctgggcaccattgagcactgagtgaatgagactccgtctgcaatcccggcacctcgggaggccgaggctggcggatcactcgcggttaggagctggagaccagcccggccaacacagtgaaaccccgtctccaccaaaaaaaaatatgaaaaccagtcaggcgtggtggcgcgcgcctgcaatggcaggcactcggcaggctgaggcaggagaatcaggcagggaggttgtagtgagccgagatggcagcagtacagtccagcttcggctcggcatcagagggagaccgtggaaagagagggagagggagaccgtggggagagggagagggagagggagagggagaccatggggagagggagaggcagagggacagggacagggacagggacagctagttggtagatttttttattactgattcaatttcataacttgttactggtctgttcaggatttcaacttctggatcaatcttgggggctgtatgtttccaggaatttatccatgtcctctaggttttctagtttgtgtgcataaagatgttcataggagtctctgaggatctttagtatttctgtggtttcagttataatgtcatctttgcaatttctgactgtgcttatttggatcttctttcctgatttcttggttaatgtagctagtggtctatcaattttgtttattctttcaaagaatcaactgttcattttattgaccttttatatgatattttttgtgtcagtttcatttagttctgctcttatctttgtgatttcttctgctggcttggggtttggtttgttcctatttttctacttccttgaagtgcaacattaagttgttaatttgaagtctttttgtctttttgatgtaggcatttggcactataaacttccctcttaacactttcttctctttttttttgctgtatcccagaggttttggtatgttgtgtctctgttttcacttgtttccaaaaaaaaatgtttatttctgccttaatttcattgtttagctagaagttgttcaggaacaagttgtttagtttttatgtacccatgtggttttgagagttcttcttggtattgatttctaattttattccactgtggtctgagaaggtgcttaatataattttgatttttcaaaaattattgagactttttttaatgaccaagcatatggcaaattttagagaatgttttgtgcacaaatgagaaaaatgtatattctgcagttgttgagtgggatgttctgtaaatgtctattaggtctatttcctcaagagtccaatttaagtccagagtttgttagttttctgcctcagtgatctgtcagtgggatgttgaagtcacccactattattgtatggctgtctatctcatttcttaggtctagtagtatttgttttataaatctgcatgctccagtgttgggtgcatacacatttaggatagttaaattttcttgttgaattgaacctttatcattatgtaatgttcttttgcatatttttaactgttggtttaaagctgattttatctgatacaagactagcaactcctgtgcttttgttttccatttccatgatatgtcttcttccacccttttactttgagcctgtggatgtcattacactttaggtggatctcttgcaggcagcaaatgattaggtgttgttttttcatccaatttgccaatctgtatcttttaagtggagcatttataggttgtttacattcaatcttaatatcaatgtgtgagattttgttactgtcatggtgttgttatcgttttgtagtcttaattttgtaattgctttataggttctatgaactttgtacttatatgtgcttttacggtagccagtattgtccttctgtttccacgtttagaatgcccttgagcatatcttgtaaatccggtctggtggtgaagaatttccttagcatttgattatctgggaaataatttcttctttgtttataaagtttagtttgacaggatattacatttttggctggcatttgttttcttttaaaaggctaaaaataggctcccaatcttttctgcttgtacggcttctgtggagaagtccacagttagtctgttaaaggcagctagggcaaaggaccaaatgtgagtgtcattacacactagttgggtgtcctggaggcagcagacgattggctcttgttttttcatccaatttgccaatctgtatcttttaagtggagaatttaggctgtttacattcagggttaatcttgcaatgacaccatatttggcccttttctctagctgcctttaaaattttttatttaatgttgaccttggccttggtgattttcatcttttatggtatcttgcaggtgttctctgaatttcttacatctggatgtctacctctctatcaagagtagggaaattttcctgaattattccttcaaatttgttttccaagttgcttactttttcttcttttctttcagaaatgcctgtaagtcataggtttggttgttttacataattccatatttcttgaagacttcatttatttttaaaattcttttaatttgaaagcctgttctttgagctctgaaattctttttttctgcttggtcgagttagatagtttctcaggtccttttcagttgtcatattttctgagccttttattttaatctatttgcattagaagagtattgatcattaacatttacaaaatatttaaaaatttttgaattcatataatccaaaacagaaggaaaaatatcttgatcttcttaatattaaaaataatatgattgatcaacaaaatggcaaggtctcttcactgcacagaaacaacaatacaagcagaaactgtcagagccaactgtatcagaattctggaaaacaaaattttatagcaaataagtaaaagtgctgaatcaggaaaaaggcaacttttaaatggtggggaggttttgtggtgttttaacttttccctgcttcagcccctccctagctcagccatggtcttgaagatggcagttcacattgccagtgagggaccctgtttcctgattccagagggagcacagaagaccttattcacacattattgtgtttgcctattctaacctatgtaaggactcactgaatgactgatatgaggtgcccttgtgtgttatacttaactcagaactcatcaggtggaaaagcagtaggcactgtcaaaaacattgtaagacaaatgaaaaccatacagcaacctggggcaaaagacaaaataggccacctaaagcctgggaggaaaagataggaagaatgtctttgaaaaattaggactttcaaaaatgcctgtgtattttgatgaatctagaaaaacatacacatgctcagaaaagacctgagaggaccctaagctttcactctgactgatctctaggttcagtacaagcaagaagtgaaggctacggcagagttgtaaacagcctggctaagtgttgaaggagtgccactgcacagagataatctgcaaagaatagaagtggtttttaaatttatttgtttgtttttagctactggcacttaagaaaatctgtgtcaaaacactagttaaacacaagctaaagaaacatagactttagtcactaaatatgacaaggaatacagtctttgcaaaaataatctggaaaagtcactaaacaatggctgacttcagccttcaacaataaaaaaatgacaaactctgggaaaggaaatatctgatttccatagttaccacatgataatagtcaaatgttgagttttcaacaaaaaccaaaagacatacaaagaaatagtaagtccaggcattggatttactagacaaagaatttttgtcgactgtcttgaatatgctctaagaatgaaaggaaaccatggacaaagaactaaaggaaactattaagtaagaacaaaatgagaatatcagcaaagagatagaaattacaaaaagaaaccaaatagaaattctggagctgaaaagtgcaataacaaatagtatactcactagaaagattcaatttgattaggcagatttaattaggcagaagaatgaatcagtgaacttgaagataggattactgacatcacccaagtctgaggagagtagaaaggaaaaaaagaagaggtgaacagagcctaagggacccatgggacatcattaagtgtaccaacatatgtatttttggagtcccagcatataagagaagtaggtagactatttgaaaaaataatatctgcaggtgcccagaatttgatgaaagacatgaatcttcatgtcctagaagctcaataactctaaccaagataaactcaaagagatctgcactgagacatgttataatccaattgttgaaaggaaaagacaaagagaaaatcttaaaagcagcaagggagaagtgactcattatatacaagggattctaactaaggttatcaggtatttctcctcagaaaacatggagccagaaggcaatgggctgacatatttaaatgctgaaagtaaacaaaaactgcacctataattttatattcaacagaactattctttgaaagtaaaggagaaattaagacattcactgataaacaaaacctgagggagtttaccagtagacctgagttataagaaatactgggaattcttccagctgaaataaaaggacactagacagtaactcaaagctgtatggaaaacatgttgatctgtagtaagggtaactgtataggtagatataaaagtcagcattattttatttttagtttctaactctatttttatttcttacataataaaagacaaatgcatttaaaatcagttattagttacacaacgtataaagatataatttgtgacaacaacaacataaagggacagagacagagctgtataggagcagggtttttgtatgttattgaagttaagttggtatcaattcaaacaagattgctacaaatttaagatgttaagtattatccctcttatagccactaagaaaatatccagaaagtatacacaaaaggaaatgagacaggaatcaatattgttcactacaaaaaaatcagctaaacacaaaatgagacaggaatagaggaaatgagagacaaaggtatataaagcatacagaaaacaaacaaaaaaagaggcagaagtaaatccttctttatcagtaattaatttacatgtaaatgagttaaattctccaaccacaaagcagaggtttgtagaatgaatgaatacaactaaacaggactaaactatatggtatctaaaagaggttcactttagatccaaagacacaaataggttgaaagtgaaaaaaagatgaaaaaatatgaggcaaggggatgttcaaagaaataaaataacatgtccaaagacacaatcctaagtgatggtagagacaacatgataatctacagtttctgatttccagtctattactgtttctgccatctaattttaaactcccttattttcctacaatgggttttcccttccccaatttttattcatagtataaacataatataaggaaaaatttacaatcatccccttgcctcaatagaaatatttctctttagtttattttagtccttgcttatatggatacattattgcaaatcaaattatactgcttatattgcaatgctgcctttccatcaagtacacattattttgtcactacttaatcatttttaatgtttacataatactccattgagtttacatgttattatatactgcaccaatccctaattattagaaattaggttttcctagttttaaaaataatacaactgtatggatcatttttaacagtctgacttcttttaaaaaataatttcttaggattaaactcctggagaagggttaaatcatgatctttaatatgcttttccaagttattttctaattaggttatatttaacctttccattattataaatctaccacccctgaccataagaataaggtttaagactcctaaacatattttaatatttaataatggccacaatatagcagaatagaaatttttttaaaatgcagagaaaacaactcatttcatttttgcattttcactgttgacctttgtacatatgatcatccttttaaactttcactcatagataatgatagtgactaattcttttagatagaataactgtaattagtttcatatacatattagcaggcattatagcaaaacttatccagaatagagttaaaagaatattgttgaatctctaatagtattctgatttttcaatttaaattcctgattaaaatagcaatttcaaaattagaacagtaagataattcagaacaatatataaacagtatgaaatgttaattcatctgtatctcagcttattattttagatagctaaatttatctgtaatttcatggcaaaactaaaaagttatgcctaaatgttggactttttggactatttcataaaaaattaattttccagataaccaaattttatgcctttaagtacatacttttattttggcatttttgaggacattttactcttaagcaaagtatattgaacactttctctgccttaataaaaaagtattctgaacagaagttgatctttccttgactcaggaccttgtcatcattttaaacaatgtgttgtgtgggattataatggtacctggagagctaataatagtacctgaagctagtaagatgtaaaggctttttacaaccatgctaagcggttccagtatgctgtacttttggggagtatttgttaatattcttatttatgttttctccccatcatgtaatgcgtctacctccaattacctctctgttgtctgtttcaaaaatgggctgggctaggaaacccagataacagagtgagagttacgtatgaaattaaaagcaaatgggtttttatctttggtagagttctcttaaaaattttttttataaaaccattcctatctgttagtcactgctcatgattaggtatagagccagacctcaggccatctctccttcctcacaacatggataaccatgtgtactgctcagagttctgcccactgagagaatttctcttcaccactgcctttcagagccacctgggaggaggatttgtggtagtcttctaaggctgccataataacgtaccacaaactgggtggcttagataacagcaaggtattatttcacagttctggagacaggaagtccaaaatgaaggtgtgggcagggttgatctcttctgagggctatgaaggaaggatctgttccatgcctcttcctgagctcctctgtgctagcttcttgggggttgctggcaagctttggcattccttggtttatagaaacatcaccctgatctctgccttcatcttcacatggcatcctccctgtgtgtgtgtgtgtgtccaaatttccccttttcataaggacaccagtcattttggattagggcccactctaacgacccaattttaacttgtttatctctgtaaagatcctatctccaaataaggtcacattctgaggcactggggtttaggaatctgcaatatctcttttgagggacacagttcaacccacaacaggacagtggctgcctacttctggctggtgccggtatacagagctgtaaagaagaactgtgtttttcttccttcattagtgatcttagggaactccccagcaaagacagaggcagggccataggggaggctgagccacctgctcatggaatttccttaggcatttcagacctgcttgggctgggtctaatgtaaattgtttccattttgtcgggggacactgctatccttatccagttttatgctttttggatcataatcagttcgttgtggatggttcatggtcaagcctttagtcactgccagggcctgtcacaggccaggctctgcccttccaatggaggaaagtgtgggcagaggatggtgtggctttacttcgaagtttgtgtggtctgctgagtgcttcttactgtgtttgccaacctctgtgtagcatctctgccaccacagactcttccaatatcatcggatccactgagtcctaaggtacaagagttagggcagcttgtacagtaccctggacctgcgacagaatccttgcttattcaaaatgggcaacattacttttatgtatgtatgtatttatttatttatttttgagatggcgcctcactctgtcgcccaagctgcagtgcaatggtgcaatctcggctcactgcaagctccgcctcccgggttcatgccattctcctgcctcagcctccagagtagctgggactacaggcacctgccactacgcccggctaattttttgtatttttagtagagacagggtttcaccatgttagccaggatggtctcaatcttccgacctcatgatccacccacctcggcctcccaaagtgctgggattacaggcatgagccaccctgcccggccaacattacttttatttttaaattttaaagtaattataggtttgcatgaagttgcaaagaaatgtacagagaagttctgtgcatctttcctccaacctcccccaatgttgacatctggtgtaactatagtacaatatcaagttaagaaatcgacattggtacaatccacagagcttatgcagatttcacccattatttgagtactcatttgattgtgtgtctctatgtgtgtatgagggtgggatgtatagctctatgtatttctatcacatgtgtagcttcatgtaaccattaccacaatcaagatgcttaactctgttatcactgcaagattccctcgtaatacctctttacagccatatctaccttctcccctcccatatccctaacccttgcaactacaaatctgttatctttataattttattatttcacaaatgctgtgtaaatggagccatacagtatgtatcctcttgaggttggcttttttttttttttcactcagcataatttccttgggattcatccaaattgttgcatgtatcaacagtttgtttctttttgttgttgagtagtattccacagtatggattcaccagtttgtttaaccattctttagttgaacaacatttgggtagtttccaggattgagctattacaaataaaactgctatgaacatttgggtgcaggtttttgtgtgaatataaatgttttttcatttctctgaggtaaatgcccaagactgcaattgttgggttgtactgtagttgcatgtttagtttcataagaaactactaccaaactattttccagaggggctataccattttacattcccaccaacagtgtataagtgatcagtttctctacctcctggccagcatttgctgccactatttctattttagtcattctgctgtgtgtgtagtgatagctcattgtggtcttaatttccatttccctcttgcctaatgacaataaacatcttttcttttttctttgagacagggtctcaatccattgcgcccaggctggtatgcagtcatgttgtatctggaattggtgggttcttggtctcactgacttcaagaatgaagccgcagaccctcgtggtgagtgttacagttcttaaaggtggcgtgtccaggatttgttccttctgacgttcggatgtgctcggagtttcttctttctggtgggtttgtggtctcgctggctcaggagtgaagttacacaccttcgtggtgagtgttacagctctttgggcggcgcatctggagttgttcattcctcctggtgggttcgtggtctcactggcttcaggagtgaagctgcagacctttgcggtgagtgttacagctcataaaggcagtgtggacccaaagagggagcagcagcaagatttattgcaaagagtgaaagaacaaagcttccacagtgtggaaggggacctgagcaggttgccactgctggctcaggcagcctgcttttattctcttattgggccacacccacatcctgctgattggtccattttacagagagctgattggtccattttacagagcactgattggtctgttttgacagggtgctgattggtgtatttacaatccctgagctagacacaaaagttctccacgtccccactagattagctagacacagagtgtcgacacaaaagttctccatgtgcccaccagagtagctagatacagagtgttgattggtgcattcacaaaccctgagctagacacagggtgctgattggtgtgtttacaaaccttgagctagttacagagtgccgattggtgtatttaccatcccttatctagacataaaggttctccgagtcgccaccagactcaggagcccagctgtctccacccagtggaccccgcaccggggctgcaggtggagctgcctgccagtcccgtgccatgcgcccgcactcctcagcccttgggtggtctatgggactgggcgccgtggagtaggggacggcgctcgttggggaggctcgggccatgcaggaacccatggtgtgtgggggaagctcaggcatggtgggttgcaggtcccgagccctgccccacggggaggcagctaaggcctggcgagaaatcgagtgcagcaccagtgggccagcactgctgggggacccagcacaccctccgcagccactggcccgggtgctaaacccctcactgcctgggaccggcagggctggctggccgctccgagtgtggggcccgccaagcccatgcccacccagaactccagctggcccacaagcgctgccgcagccccggttcctgctcgtgcctctccctccacacctccctgcaagttgagggagccagctctggccttggccagcccagaaaggggctcccacagtgcagcggtgggctgaagcgctcctcaagtgccgccaaagtgggagcccaggcagaggaggctccaagagcgagcgagggctgcgagggctgccagcacgctgtcacctgtcaatgtgaccatggctcactgcagcctcaacttcccgggctaaggtgatcccacctcagcttcctgaggagctaggattataggtgcatgccaccatacccagctaattgtattttttatagagatggggttttgctatgttgcccaggctggtctcaaactcctaggctcaagtgatctctcaccttggttttccaaagtggtgggattacaggtgtgaaccactgtgcccggccatggacatcttttcatgtgtttattttacccctttgtgtcctctttggtgaagtgtcacttggattgttttttttttttaatgttgaattttgaaagtttttaatatatttttaggcgcaaatttttggtcaaatatgagattttgaaatttttttccagcccataattgtcttttcattatcttaatagggttttaaatattgctttacattttgatgaagtccaatttttcaatttttttcttttatagatgtgtttttggtgttaagtctaagaactctctgcctagttcttttagagttttacattttccatttaggtccatgattcattatgagttcatttgtgtaatgtataggattttatcaaagtttttgttttcccccaacatggatgtccagttgcttcagcatcatttattaaaaaggctctccttcttcatttgaaatgctattgctattttgctaaagattaatttggtacatttctgtacacctatgtctaggttcttcattggtctatgcaactatccttctccaagtaccactcttgatcactatacttacatagtaagccttgacacagggagaagtgattcctcccaccctattcttcttttcaaaatagttttgacaattcttatcaggggaacccacccctgataattcaacgttatttcacgtaggttcttttctatttccttaagtgtcagctggtctgagaaataaagggaaagagtacaaaagagagaaattttaaagctgggtatccagaggagacaccacatgttggcaggttccatgatgtcccccaatctgcaaaaccagaaagtttttattagtgattttcaaaggggagggagtgtacgaatagggtgtgggtcacagagctcacatgcttcacaaggtaataaaatattacaaggcaaatggaagcagggtaagatcacaggaccggggcgaaattaaaattgctaatgaagttttgggtatgcattgtctttggtaacatcttatcaggagacagggtttgaaagcagacaaccggtctgaccaaaatttattaggtgggaatttcctcgtcctgataggcctgggagcgctactggagaccggggcgtgctatgggagactggggcttatttcatcccttatctgcaagcgtagaagacagacgttcccagagcggccatttcagagacctacccctaggaacacattccctctctcagggctgttccttgctgagaaaaagaattcagcgatatttctcctatttgcttttgaaagaagagaaatatggctctgttccacctggctctcaggcagccagatctaatggttatctctcttgttccctgaacatcactattatcctgttcttttttcaaggcgcccagatttcatattgtttaaacaatttgtgcagttaatgcaatcatcacagggtgctgaggcgacatacatcctcagcttatgaagatgatgagattaagagattaaagtaaagacaggcataggaaatcacaagaatattgattggggaagtgataaatgtccattaaatcttcacaatttatgttcagagattgcagtaaagataggtgtaagaaattataaaagtattagtttggggaactaataaatgtccatgaaatcttcacaatttatgttcttctgccacggcttcagccagtccctccattcagggtccctgatgtcccgcaacaaattctagagtcagtcccttccacataagttttagaataagcttgtctatgtctacaaaaacaaccttgctgaaattttgataggaattgtgttaaatatatagatcaatctggggggaactggcatcttcactaggtaagtcttccaatccatgaacacagtatgtctccccaagtacttgcatgtctttgtttttttcatcagcaatttgtaattttcatcatacaatcctgtacctaagtatttcattatctttggagtgattgtaaatagtactgagtttttaatatttgttttcctgttcattgttagtatatagaaatggaattgattattgtgtgttggtcttatatcctttgaccttactacacttgcttattagttctaagaggattttggaggtttatttctcagaattttcttcataggcaatcatgtcatggaaaagccttactttaacccactaaatagattgtagcagcatgtccaactgtcacatgggttgccttcaagatgcaaagaggccaccctgctttgtgctttcccctttatggtggcaggaaaattgtgtcttactttaaacaagatattccaatatacaccagacccttgaactccttggaacttcattgatgtgattggccactgagctttggaggaattatttccaactgctggctgacgtgtcataaggcatctagggtgcttgctacgttccactcgcaagtccaataggcattctgtcaccaaagcagtggacctgcatgatgtcctttgggatatcaagatgatcaggatacttctggaccatagtattataatgttctatagtccctgctacgtgaaggtgaactgcttctcatttttttctttaactaacggagaagagggaaaatccatttgtttcatcaacacagctagggagctaggggctgtgttcatctgctccagtaaagataccatctggaatttctgcaagtgacatcaccatctgattgtgtgtgaagatctgctgttatcttccacaattcatcaggctttttgcaccagccaaagataaaaaccatcattgcatttggggatgcaatgggaaccactgtgcctgcatctttcaggtctgtgatggtggcactaatctctgcaattccagcgatgtggtgttgctgttagtttactatctcagtgggagttgcaattatagaggcttccatttaaacctccctagctatacttaagacccactcttgacaggcagtggcattttaggtatctgtggattagcatcactcaggaacagtctctaacaacccttagaagatatgggtattctcttttccatagtgctcagtgctcagtcactctgttaaatgactctggagaagacctaggggagattcacacaatcttgttgcagagtccttcctcaaaaagacctggtctgttttttggccaaagaacttgtgatctgtggactagcttaggtctaggacctgagtaagaggatataaatcatcatattcaagtaagatttctgttcccccagacccagaattttcctgcatgcacatgttaagcaaccttttagtagactgcttactgggtcacattttaggatccagcaattaattagccattgccacagatctgtgcaggccaaagccctttgtttaccaccccatccctgtacttattgtgataattgtgcccacttggtctgtgatagtagagcactgccatctggcctctgctacttcagaatctcactatacccactgtgagcaaagaatgtaatttcgtaatctctcactagtgtcatcaccttggagagcacaaccaaagcaaaactattcaaggatgctggcatctccctcttcaaggtaccttggtgaagggagtgtcttccaggccatcccaaggaatatggttgatgaagaagggatgctaagcagattgcacaaaacagatccttgtgaatctttggatcttttatgtatcctaggggaatttttcctatctctgaatctttggaccctttccatgtgccaggaatcttgtcattacccatagaccagtattaagcttgctcctaacatttgtggtgaccaggaaaagggtacaaatggagggtcacatacatatatttgtaaatcaggataaaaaacaaataaaatgttttgtccttctaccttgaaaaatgttacagtttagaatgttcatacttaggattctcagagaaactttggaattccactatggagcatggtggcactgctccatgaggaagggcctgggagaggagcaggtctaaggacagcattggtcactgtcgagttcaggcttcatttagagaatctcgcagactatttgtgcccctctccagtgcttaagccatcatattaattcctgaacttgagtgagtgcactcaagttaatgaattcagctgcttccagggatgtattaggaccagtggatcccaaggtcatgtgtccattgtcacacctcctttatcataaaatgggtaccttagtccagggtgatgttatataggatacccttttataaagcaggcatgtgtaagccctcagatggtaatgctggatagaaaacaaaaatggatacagtggatacattgcatagagaagaaaaaaaatacaatggatagagaagaaaaacccatatccaaagaagatgccagtcccaggagggatgaatcactgcttcctgcatgatggaggggtttcatgtgattagctggctgctctattcaagagatggcaccctactggtggctcaggtccagtctatgtagctctataatcactcagtcagtagtggcaataattagatcaactttggtaagagaaagcttatgtttttgggctaaaacatggtctcacccctgccactatggtttactccattcttggaatcattttataagcactgaggtagccaaagacagaggctagctgacatccactggatgtaccatcttattcactggtttttcagtatctcctctgaagtggatactctcaggtagacattgatggacagacatagttccacaagcttatgcccaccctcacaggtcatctatatgtctctttcccacatctcctagtctctactcttgctccttttagttcatttgtcattacacaggagtccatgtatatccttacttcaggttattactccctccttataaaattgatgattaagtgttcttaaagctccacctgtaagatttctcctccccactgcaccacccgatattgtactttagacacaacagatgttctgcagcagtagcagcagtagtccttattggctcatgccagcatgctagcctgacccattcatgaattagacccaggtgttttcttcctcctttatctggtcatagggaaaatttacaaggtttgagctaaggtgttgatgcaatgaatgggggaggcttggaggtttgggtcacctgtttatgtagcttttttgtgcccagggtattcatgaatatgatcgtctcctgcatcttggtgaggtttatctcttaccctctagcacaattcctgaaaattttctgcttcttgttcaccatatctaattaatatgatgttttatcattatggtggatgagcacaatattctgtgcaatgtaaaaatgatcaaagtccctgtggactatattgtaacagagaacaagagagctaacatagccctggggtgagaggataaatttgtatctctgtcctttccatatgtattatcttcatttgtccttctttattgatggagattttaaaaattacatttgcccaaacattagatctgttgtaataaacatgtagcagctggcatggcagctgtaattggagctaccacttggttaagttttcagtagtacatcattatcctccaccatctgtttatgttttgcaggaaccatacgagtgaattgaatggggaggtgcgatgggaattatcaccccaacatcctttaaattttctagagtgactcagcaaatgctcaaagattcattatttctattgatttgccatcttggttgttgagggagggtgctaacttaggagctttcgcttgcccttcctgtataatgacgctaatgccccaggtcaggaaaacaatgtgaggactaagagttgctaagaaaatccatgtcaattatatactcaacattggggaaatcaccagaaggggatgttatggaccctttagaaccacggcgagatagacttgagcaaggactcaatttatcaccgtgcagggccaggactagggtgaggcaaatgagcacctagcatgcaagttttaaggaaatactcacaagtgccaaacctgcacttgcacaaccctgagagtgagtgcttcctcaaatgttgtgacctcagcaccttgtttgtctcaccctagtcctggtcctatattcaagtataaaggtactgcacatcccagtacctcctctgcctctttttttttttttttttttgagacggagtctcgctctgtcgcccaggccggactgcggactgcagcggcgcaatctcggctcactgcaagctccgcttcccgggttcacgccattctcctgcctcagcctcccgagtagctgggactacaggcgcccgccaccgcgcccggctaattttttgtatttttagtagagacggggtttcaccttgttagccaggatggtctcgatctcctgacctcatgatccactcgcctcggcctcccaaagtgctgggattacaggcgtgagccaccgcgcccggcccttcctctgcctcttatatctcatccaaaccatagaagagtcaataatccaagaaagcagtgataagagagtttggagagtaagactgcaagtgaaggagtatttctgagttgttatctctgtggggaactgaggtttaataaccctgagaaatcatgaattatgtacctcggaattatcccatttgtggaggggaaactcccttgcaataagaggctgtgcattccagcaggctgagcatgttcttatggttctggagaaagctctgaggccgaagaatggtgagtgtttcagatgggaagccatcagtgtgcctgggactgtcctgcacagctgtggctgacattagagctgggctgagaagatatggcatggagtaccaacaacaccttctaatctactctgtgtcattactagtaataacttgagtacttatgatgccaccatatgccatggattaactgctttctcatttctcccaggcaaggagtgtacatccttgcacttctcaaatatgtgagcaatccaattctagaatcacattctgagggtctgttctttggggccactttctgtaaaacttaggaaaacagatgaccttcccaaattaggcgatttaaagagagttaataaagatactttttacaaagttatggagagggataccacaaagaagagtgtggtatcttatggtgaataacagcagagatatcattacttcctttaactacatggagggaggagaaggagcctttaccagaacctggagacagaactgtgtggagaggaccaactaatagatccgcctaataggagctgcccccttagatagagaagagcagctagccagctatgattcttccagagggaagccaggggtgtaagtacctggcctcactctccatctctctgatctcctgtgcccactggttaactgcctgagagcaagggagcccactgatgctgcctgtccagagagcaagggagcccactgatgctgcttatccaggtcagcctcctgggtcgctcatttctagggtggagacaggcagatagtaggcctgaagagataaatccagtacacattgcttaaaaggaaacaaaatagctttaaaagaaccagtctagaactggctcctcggtgagagtatatcccactgaagaaggaattcatgaattttacactatgtaaagccagaaaattaactttcccctcagggcttagtgtagtgtagcatcccccacccccccaccatattctaagttagagaagaatactaactgcctatttttccttctgtgctcagtgagccttatctgttctcactggtttcacattccttgaggctcagcaagttcttgcttacctccccagcacagctgcaaggtcataagattgataagtatatgttacagaaccatgtattcccaagaatgtaagacgtgaaataacaactgcctttgttctcgcttctgtaagtatgcttcctgcatcatgtagctctgggccactgactgcttaaaaggtggctgctttctttgtccagggctcagactttcctggacgctagtccacctgagccagatgatcaccttttaataaaggactctcctgaactctgttcattctctcccatctttgattgtcccacaacaccacaactcatggtccagtcatctggcccattttgtttcggtgtcatcctttctggtgtgtaggacaaggatctttgggggagtggcatatttgcctactctttatttcagagttgtctatgtgagtaataaactgtctgaatctgaaagtagctcactgtatttttactcgctgaatcatgctttgccttcccttgtatgcgcttgacatagaatactacttccttctccaaaatctgtaggtccaagttctaagcaattgctgtgattctgttgtgtttaatattccatatgtaaactccagattatcacatttgtattacttatctatgttacatggaatttaatttggagagcttggctgggcccggtggctcacgcctgtagtcccagcactttgggaggctgaggcgagaggatcactttagcccaggagttcaagaccagcctgggtaacacagcaagatcctgtctcaaaacaaaaatttggagagctcccggtaatcgagtgctgagtctatgtcaaagacgtgaagacacggagagctcttctccatgagcagctgacattgctatgtcagaggagggcagatggactttctggtcagggtcaccaagacggcatgtgaaggaggtgccaaccagtggactttgggcttcactttcagtcatagaaacgtcctctctgcccaggatccataggaactgtgacagtgtggtgttgaaaatcaacatgtccttcaaaaaagcctaaaatgtgacaacttagaaacacaagaggatgccctaacccaccagcaaataagaaaaaaaaaaattgaaagcatctgcgtgaaatctctcagaatcttagtgtgttaaaatcagaggagatctacgagctaaactaatgcaagccccccattttacagatcataaaactgaggccaagggaggggaggaccttgctcatggtcaccctgcatgctggtggcacatccaggactagccccaagcccacccacaaccctccccactctttggacgaagggcatcacacttcccttttctcattcttgctgctcctaagtgcttatctgttggattttacatgtgtattccattagatctagtcctcctaccattgccctggttaaagctgttttttttttttttttttttttttgccacgatgttgatgatggcgatgacaatattaataatagcagcagctaaccctgattgagcccttcccactcttcaagccctattctaggctttacaagtatgaacactttaaaatcaaacagccctttggggaaggaattagtatcactctagttttataaatgaggaagctgaggcacaaagaggtaaagcaattttctctctcagtgtcaagagtggtaagtattggagccataatttaagtcaggccgtctgacttcagagtttatgctctcaaagactttattaaactgcctttaatgtatattaacataatggttaacattattacaccatttacagatcaaggaactgcatcctgatgagattaagcaaggtcacaaggctagtaacaagcaaaattagatctcaaacccgagtgtctgactccaaagcccatgctcttaaacactaggtgtgcctctttcttgtcataataacttcctcaccttagacttgctaaaaataaatctccaacagagagctaaaaaagctgtatttctaactagcacacaagtttaaaaatcactatcagtggtcaaagttaaggtactttggaatcaaacagtatagagcgtgggatcctgggcctatcacgtaacctctttaagcctcatttctctaacacagggatagtaattatgtgtaatgagagctcgcatgtgttaactgcttactgctacccaagcccagtgcttcatgggcatgaccacgtttgattgaagtacccatctcatcaggttgtagtgagagttaagtgggtaacacaagcaacttgctgccacagtatctgcagccagtagacacccaagaagtgtcgactggctactgtgaggactcttggccctttttgtgttcacctcccttctgggtaggaagcttcctacacctatgatgtgtgtcttactgatttttgtgtctctccagagtctgcctcgtagctggtctccaatcagtctgtataaatctgttgacatgaatgtcaaagtgcatcctctgctaggctttgtgacccctgagggttttcaggctgacatgagcctcttgccagatttgttcacactgttcccaaattctcccctgaatagtagcaatacatacatattgtacatacatacaacacacacatacgtacattcagtgatgatgtttctgctttagggttaaggggcagtgtgggttgatttttgaaggttttgcagataagaatggacaatttgggcggcttggacaaaccactgtcacaatatcatataaaggaggctgagatgatcgtggccaaggttccagagagtgcttagatgggagacctccctggcttagtcacctgcatttgatttctcacagaggctcatcttgctatgggagtgcttctcttgctgtcacctataaaatggggtaaccattgccttccacatcaaggggtggcttgaagaccaaaccaaatgatcgcatgctcatggaggcttttgtcaaccattaagctctgcatcagcgcaagacgtgggtcagatgggggttttagttctcaggaaggaggtggtttcttcccactgtggaggcttcctctcccaggactcagggccgcaccttctctaggttctctcctcctgcttctctgtcattcagcttaagccgggctgagcaacttaacttgcttctgaatcttttcagacccatgttccttatccttgccccctgcttgcagattcttagctaagcttttaacttttctacctcagtctttctggtgttccggattctactccagcagcgccctgcatcctctggtaagtttcatttggcaatcttgggcagggaccactgcctgagcatgcagccatcttggggcaggagtctattcttgtcttcctttattaaaaacatgcgtgccaaaaacatgcatgccactcacctcctggagcattctgtcacatgtcttgtctcaggccaacaaaatcccacccttcataagaatttgatttcttttctgacctcatgtcattccataaacatgattttctggtcccttggggaccctctgaatatctccagctaggggggatctaacccaaactactggaaaacacagcctgctgctgacactaagagctacttctcaggaagctgcaagtgacacatatgtgcaacacctcagtgaagtccctggcaggtcacacaggagagctctgctccctgccacttcacttccaagccccgggaaagtgtttgaggagcagggactgtctgagcccaagctaagccatcatatcccctgtaacctgcacgtatacatccagatggcctgaagcaactgaagatccacaaaagaagtgaaaacagccttaactgatgacattccaccattgtgatttgtttctgccccatcctaactgatcaatgtactttgtcatctcccccaccattaagaaggttctttgtaatctcccccacccttaagcaggttcttggtaattctccccacccttgagaatgtactttgtgagatccaccccctgcccacaaaatattgctcctaactccaccgcctatccccaaacctataagaactaatgataatcccaccaccctttgctgactctcttttctgactcagccagcctgcacccaagtgaaataaacagccttgttgctcacacaaagcctgtttggtggactctcttcacacggatgcacttgagaaatttggtgctaaagacccgggtcagagggactccttccggagaccagtcccctgtcctcaccctcactccgtgaagagatccacctatgaccttgggtcctcagaccaaccagcccaaggaacatctcaccaatttcaaattgggtaagcagtcttttcactctcttctccagcctctcttgctacccttcaatcttcctctctcactacacttcaatctccctgtccttccaattccagttctttttcctctctagtagagacaaaggagacacattttatccatggacccaaaactccagtgccggtcacggactcgggaagatagccttcccttggtgtttaatcattgcagggatgcctgcctgattattcacccacaatccactgcctcagcctcccaaagtgctgggattacaggcgtgagccaccccccccagccaggactcccttttttcattccagaccagcctgatcaacatagagaaaccccatctctactaaaaatacaaaattagctgggtgtggtggcgcatgcctgtaatcccagctactcgggaggctgaggcaggagaattgcttgaaccgggaggcagaggttacagtgagctgagattgcaccattgcactccagcctgggcaacaagagtgaaactctctctcaaaaaagaaaagtggggagtccttctacttcctgcttgtcttcaagggcccccacactgatattgctcaacagatgaaatataagcaatggttttgcctgagcccaagtgctttgtccctatctcaggtgaatgatgggctatctgatgttgtgagaagacaagactcatacacagagagaacagagagaagctgccatttctgttttagccaagcaggcaagttcccatcaaaataagaggaactccagaaagtaatgatacatacagcccattattaggtaagtttgctattgaacaatgatgctcatgtatggggccctgtagaatgtacaaaacagaccttcagctggacacagtgagggaaggacctggaagtgtgttctagacactttaatacattcaccccacaaggccctggctgcccaccctccaccactcaacacattgtgcatacacacacacgtgcacatacatgcatgcatgcatgcacatacacttggccactcctctccttctctcctgcacatccctgaggccacttgactttgctgctcttctgtccaagaccacagtccctgcccagcttccagatgtacaaaggagagcttagacacttgaggaaaatggctttcagctctaacagcctccctggtctcacagatctgctggtgttgacctttggggactaaagaattgctacgtctccccctgaggggcctgaactggggtggaggtgtggtcagctgggtggaaaccagttcagataaaagtacaagagccactttaaatagtaaggtctgatgggaaacagggaaactgaacacaaaggcaaccttctgtgttgacaaaaacaaggccctccaggtcctggcacaggccagaggactcaagtaaggacctatgctgatacagcacagagtgcaggaacacaggattgggggtcagacagcttcaaatcctggctctgccccttactgggtttgtaactctgggtaaattgcttgatctccccaaccctcagtttcttcatctgtgaaaaaggatgatccttatccttgcccccttgcctgcagattcttagatgagcttttaacttttctacggaaatcaatctttctgttgacagcttcacagagctttcgtcaggaaggcacaagacaaagtctgtggtcatatggcaggcacatggcccatggcagaaaaatgcatttctcagtgtattggccattggctatgtctttttattttctgtattttgatgctttgcatccttgctgaccctggagggactgcccctcctagggttagccagttcctacagagagcaaacaatttgcctagaacatgactttcatatgcaaactaaccaaacccttgctcttacccccaccctcctcctttatcaggcctttgtactgcaggccactatccccctgccttagtcacccatgagctgggtaccagacaacaagggacagcccctgtgtcccagagccctctgaaattacttaaaagaatcaatcctaagtgtgccaaccctgccttgctcattccttcttgtggaagtcatgacagagtctcttgcccacgtttctcctgctcctctctggctcttgagcaactggcactttctcatgtggctctgagtggtgggcggcgcctcctgcttctagggatctgtataggtaacaaacgtcccccttcctaatggtcactttagtgtctgcgtgtcatgtcatacttgagtagaaccaactccacctacccttcaaacagctaggcacagaccgaaatacgcactctacaggcaacagcttgttgatcctcagcacaatctgtcaggttggtgctgttatatttcacagaaaaggaatcagagccctaagtacattcagctgaaagggatagcactaggattcagaattcaggcatgcccactggacagcctggactcccaacctccgccctgctctgctgcaatcatgattatccctacctcagcaggcaggcatgggggcagtctgggtcccagtgagctcctgtgtgagagtagaggggaactttgtctctggttctggtcctgagcagccctctcttgagagctctaaggaaccacagaggagctggaccccgggcagggaggcaaccatctggagcatgctgtcttgatagacgtgaagggccctggggtggcccctgccaagaatcctctagacagtgacctatttccaaccatttccctaccatctttcagtcaagattttagattatcagcaacagaaaccagctctgggtaacttaagcagcactgattggaagactttgggctgggggactgttcatggaattgatagagaagttgaacagccaaggtcagaacctgtgttgtgggaatcaggaggctggagagaccatggagtgagacaggagggtttattgaatacactcagacccagtggtttaacatccaaaaactgggccctgaacaaagacagggtttggcttatatacacacctttgaaaggtgctagcttgaaacaagcttacagtgatatgaagtgtagtggtgcaaaagccaggatacagaggcagaacagaggcagaacaaaggcagctaatcaaactgtgacaggttcataacccaggattacatgcaactcttgctgtgcggtccagatggctgttatctaggcttactcaaaagagccttgcatgggcttatctcataatgttcgctctggcacccagacggccgcagcctaggcctgctcaggcatgtcttataaccttcactgtgctcctcagataaaacagaatacttgaagttactagttagagaaaacaggaatctataaactcataaagcttgaagagcaaggtacaatcacacagaggggagtgggatttgagggggaacttcactttttcttatccttatgttgagggagtgctgggagagtctccagagcacatccctttgagccctggcttctttgaaaatgttatcaagactgcctgggtctgggctttgcctgctactgcctctgggatgtcagcctaatatagaaagcttatttttctctttttaattttatttttcttgaatttcctgcctcatttcccccctttgatgtttcctataaatggaatttaatagaaagcatcactattatttagtccttcatgacaaggcagatcttctctctttggcaaaggtttatactttgttagagccattagttgagtggtggttgttttgtccactaagacttctatggtacaataaagtcttaactactgtgtttcctatccatgtagtatgcatgcagtgagggcatccttctatgggcccttctccttctagcatggatatggggaccatcaaaagtaaagcaaagagtagcattcttacacccagcatgggcagaagagatgttttcccaggggagggggttggctaaagcaacagaacaacagaagtacaattaataatataggaaagattattgggcctaagatttccagccacatttactcatttgatgatgactcctcaagcttcagccgtgtgtagactagtcagcttctggggtgactagagcagggtttgctgtttcctcaagtttccgccgtgtgtagactggtcagctttcggagtgaccagagcagggctgttgttgttctcagtggcaacttggtcttgtcacaggatcagcctggtcagatggtctgggtcctgctggcaggtccactggtcctgggatgccagtttcagccaactgtggtggatctaaggcacgattcctgcaactttaacagcagtgggagtggacaagattacagtatggggcccatcgcatatgggtcccagagtggttggattccatttcttaaccaaaacaaagtccccaggtttgaaagggtgtactgggtctgtcagacttataggcattctttcccacacccagccatgcactttctgcatggccatccctaaagcctgcatttgcctccttaaagttaattctcctagctcacagagatcacctttaacctgacttataattgggggtggctggcggaacaagaccttatagggtgaatacccagtttgttttgtgggggtacacctgactccgaggaggaccactggcaagacctgatcccatcgcggaagagtctccagacaaaatttcttcagcagctgcttgagtgtctggttcatgcgctccacttttcctgagctctgcagccggtaggctgtgtgtagcttctgttttatttttaatagttgagttaagtcttgaactatttcagctacaaatgctggtccactgtctgaccccagagtcaggagtagtccaaatctaagaataatgtcttttaacaacaccttagtcacttcttgtgctttctgtgttctggtggggaaaacctcaacccatcctgaaaaggtgcaaatgaacacctacatgtactgatagccccctgcccagggcctgagttaaggcttctttgatttctttaaaggccttctcctggttggcctccaagaggaggggttccttctctccccactttgtggcttcatataatggcttagccatgagcgagaaatttgggaggcagatatggcagaaccctgctgcccctaggaattctcttatttgtcaccaggtgattggagtggaaagtgtccaaacagcctgcttttgttcactaccaagccatctttccccttcgcttatatagaagcctaaatactggacactttcaaagcaaatttgagccttttccctgacattttatatccttccttccacagcaggtgcaggaggtcttgggttccttggaagcagtcctctcgtgttggggctgctagaagaaggtcatctatgtagtgaagcaagacacagtcactatttggtgcagtgtaggctttaaggtctgaggccagtgcctcttcaaagattgtaggagagtttttaaattcctgtgggagtcttgtccaaatgtactgtgattcacctcattgaaaagcaaaaataggctgactaatcggtgccagccagagacagaaaaatgcatcttttaagtctaggactgtaaaccaggcagcacttgccagaatatgtcccattaaagaatacaggtttggcaccactgggtgcatggtcactttggcctggtttacagcatgcaagtcctgcactggcctatattctccagacgccttctgcactggcaagagaggggtgttccaggatcactcacatttgactatgattccatgcttatgaagccactctaagtgcttgtggacaccccgtatggcatcggggagtagtgggtattggtgaacctgaactggagttgctcccggttttaactctaccacaactggtgcctgatttacagccagtccaagtggattactttcagcccaaactccaggaattttagtaagcaccccatgcatttcatttacccctggttccagagtctttttgcatatagcctccattcctcagcctgtgggacagtaagggttaataccatagtctccaggtgagctaggtttaaagttacattcccttgtggcccatatgtaatctgtgcttgcagtttttggaggaggtctctttctagcaagagaactgggcagtttgggaggtataggaagtcatgctaaacttcttctcctactatcatgcacatccttgactgacagaaaggccctttctctgagactctggtggctcctacagtagttgcacagttcttggatagtggccctataggtcaggttactactgagtgttcagcctcggtgtctaccataaagtccatcagctggcctccaacttctaatgtgaccatgggctcctggaggcccaatgagaaggagcccagtctgtcctagtcctcatatccttcagcccctgccaacccaatcaggtcagtgtcgggtttctcctgggtgcggtagccctcggctggtggctttcccataccacggccctggccattctctttattattattctctggacattcatccttccagtgccctttccttttgtaccatggacattaatctctctctagcctcggccagctctcagatctttttccatgcctgtataaatataggaatgaaattataccatgacacttggggtgcagttgatgtagtgtttctaggatgtctaagttccactgaatggggacgagaaatgggatcctttccaccattaaaaaagaatgtgttggtgctgagtaagctgatacagaatgatcctcagagtaggcggtgaaaggctaagggcaacacagtgtactcctgtgtgtgtgtgtgtgtgtgtgtgtgtgtgtttaggcagctttataattgtacatatcatgtatctgtacataaaaaaaaaacaaaccctgctaatggtgttacctctgcaaagcgagaccagggcctgaagagggagggagaccctcttttccttgtttactctctcactgtttcagttttcactatgtgcgtgacttatttttattaaaagaagattaaatcctgtttggaccctctttaagcaagactgaccagaagtcttgtatcatcatatccttgaattctcctgggtttgtcaaaggccccccctagggacttagccatctggaaagggggtcttgcagcttctggtcgccatgacagctgttgctcctagtgatcgcaagatgcaggcctaggcttcccagctctgtatgcagcatcccaccaccaacctgggtcccaaatgttgagataatgtctctcgcagtgccagtgtgttggtgtcacactacggtgttactttaggaagaaaatacgttcagcactctgtgctatacacttaggaaaaacaaatgttctttacctaaaaacatcttcaccctctaccttgcagtactgcctttattctcatttccctctgggataatctggcttaactgcctccagtggtctctaaacacagtcttgtttagaggttgtcttcagggctggccattctcacaccagggcccctccatgcctactcagcttcctctctcagacccagaaacagaaagaattgtctattgctccttagggggttggagaatccttgttgcctctaggaagaaaatcatgccaccctccaataggtgaagctctggatagctttttttctttccttgtgagccgacagcagcaataaatgacataaattaatttctcagtgagttattactatacattacattttcaatgagttcctcttcttcaattcaggtatatcctgatagagtaaaagtacagtaggctgggcatggtggctcacgcctgtaatcccggcactttgggaagccgaggcgggtgaatcacctgaggtcaggagttcaagaccagcctgaccaacatggtgaaaccccgtctttactaataatacaaaaattagctgggtgtggtggcacatgcttgtaagcccagctactcgggaggctgaggcaggagaatcacttaaacccaggaggcggaggttgcagtgggccgagattgtgccactgcattctagcctgggcaacagagtgagactttgtctcaaaaaaaaaaaaaaaaaagagtaaaagtacagtgtagtgagaactagaggagagaactaaattagctctcttggggaggagtggactggaaaagggaacacttgtgcttgtggtggtacctgaaggttgagtaggaattcaccaggtgaagaaatgaggagagctatcaaaacttggtgctaaatccaaggacctgactctatccagagattgcccaaactataccaagctacagcggccccaattcctctgcatctctaggatttaaagagtaggtccaggtgaactcagagtctttagtgagaggatgctcttttggcagctgtctgggacttgagtggtcaagatggaggctgtaatacgccagtgtggacggaatcaccagatgccccatgcttctcctgtggagccagtgttctgggaacaggctgggactgctgctctaaaggaaggccttgtcattcatgctgtgattcctgtgggtgccaataatatgattagaggaaggaaagggaaggaagcagaggaaaaagcaaagaaaggcaaggcaagttggggaaaggcggggaaagggaagtcagttctgctttggtgaggatcacaggccttggctcacagtggggaccagagacagacgtggaggcttacatttccttcctctgagattcccaaggcctgatagttcttggcatctcttaaaaacaaaaagtaatcatatttttacttcttccagtacaaagtctggatttatagctactcatcttacgccaaggactgattcttaggaagttggattcagacataagtttacagagttcctgggtcacccaagattctttccccaccaaagccacaaagcactccaccctgcctttttcctccttatatttcaggtgcagagctgagccttgcattcttcagttacctcctccggtggagggcagtgggaagcacctccatttctccatctagaaatgaaagctaccaccagatcttttgcagaagaatatctgcacacacatgttttggagggtcagttaaaattttacccacatgactgaaaatgaattttaagtgttcagaagccaatggaataaggaatctccacatctgtactcagacctattttctgggagtctctagacttctccaagctcaaaggtgggatgcaggaaggaggagagaaacagaattctttctgcatctgggttcccacagtagctgccctcacccattgcctgttgtgcctcacatgtgccaagctgagtggtggtgccctcaccacgtgtgtctctggtacccagaacagaaagtgagactcttgtgctaaggatgctggaggaggatatgagggcacaggggcagccatggaggagaggctcctgcccaactcagatctctgccccacactctatggaggacaattccctgctgtcagcagcaggaccccttcagtaggagggagaaagaaggggacaggaactaccacgtgtccagtgcaacctgctaggggctgtacatgtgatgtctcaatggagcctaacaacattatggggataggtcttaacaggccctttttagagataagaaaaatgaaaaataggaaaggaagcacattggcctcaggcattaagggatgagccaaagctgtcaattctgtgggtggtggggtgagctggagcctcagaacaataacccccggggggtcatttagggtcatgcacactcagctatttctgcttcaagaagactaattagcattcttttactggaacttgaggaacaaaggaggtggttgagaagaaccaaaacaaccttctgaatgagtgaaaatgagttgagtgtctgttatggactaggtgcttcctcctatgttatttcatttaatcctcacaaccaggtggtcaggtgggcggaacagacaggacccccatggctgcagggaactcaggctcagagaggtccatttcactgtctcccaggtcccatacccatcatggggccatgaaccatacttgctaaatagctcattgtcccactgagttgctcaaggtcagaaccacgtgttagtcaccatctgccccagtccctggtccaacgcctggcagagtagatggccagaacctctctctctctatttttctctctctcatgctcttttattttctccacctatatgctcctgtgtgccagggttactcccagctgctaagtgggaaaacagctcttctccttcagcaggaattcatgcctcagtgggtaccaggatgaaagcactgtgctaacagtttagtaccagatcagccacaaacccactctgcctcagtgtccccatctgtgccataaagcgatctcctagagagtcttgtcgcccaaaagaattgaattctgtaaaatatttgaaaagatttattctgagccaaatatgagtgagcatggcccgtgacacagccctcaggaggtcctgagaacatgtgtccatatgtccatgtgcccaaggtagtcgcggtgcagcttggtgctatacattttagggaggcatgagatttcaatcaaatacattttaaaaatacattggttccatctagaaaggtgggacaactcgaaggtgggggaggagctttcaggttataggcagatttaaatttttttgattgacaattggttgagtttatctaaagacctgggatcagtagaaaggaaatgtctgggttgctataggaggttgtggagactaaagtgtttttatgtttgtttgcttttgagatgaaatctcattcttattgcccaggctggagtgcaatggtgcgatctcggctcactgcagcctccacctcccagattcaagcaattctcctgcctcagcctcccgagtagctaggattacaggtgcctgccaccattcccagctatttttttgtatttttagtagagatggggtttcaccaagttggccaggctggtcttggactcctgacctcaggcgatccacccacctcagcgtcccaaagtgcggggattacaggtgtgagccactgcgcctggccaagactaaagtttaatcatgcagctgaagcctctagggagcaggcttcagagagaatagactataaatgcttctcatcagacatcaggtctatgttaatgttaatgccggagccagagatgtgtaataagccatgtcagagcccccacttcacatcatagcttgaaccagtctctcaggttaaattttgaaagtgccctggcagaggagaaagtccattcagatggttggaggagcctcagaattttatttttggttacagcttagaggtctattctgggcataagggctcttccacccttttatgggtggggctcccgatgtatcccaggagcagggcctaaaggaattcctttctacgaatgcattacattcaaaagctgttccacagcctctgtctctgtggtccttcctgcttttctacttaaaaatagtccttgcagggctttgaccagatcaaagagacagacactgctggaacttgttggccagaggctgtccctgttaactcgtgcctgctggctacaagcaggttatgctgggtcctgcagggaataagaattgtaagcactgcgagggctggaagcacgtcttgcttaattattgatttatccttggaatagcagagaatatttcttaaatgaatgcatgaatgaaattgtgaatgtgtggaggtggttcctgcctatctagagctgacctgctagctggggagatgaggtacacacaccacacatgtaaagtataatgatgacccaaggaccaagttaccacacagagcaagggcacaagatgttgatgacagcacagcatgtcaggtcacatttgtgttgcaaatagtaaagtctgcaggaatttattgtaactcagggctggaggtagcaggaggggcctccaggaggaggtgggcttttagctgactcttgagtgctgagaaccctcagaggcatcccacaggagaggcagttgctgcaaaggctctattctgggagtgagcaaggcaagttcaaacagaggctgtgtctctgccataggaagaagggagcctgagcaggtgctagtggggctgagtgttgtggtccaggctgggcccctcagctcactctgtgagctgactcagtgactcacccactctgtctccagtttctctgtctgacagatggagcctcagaatatctacctgcttggggtctggttgggatttcctgggatgtgtttgcatatacgcattttgcaactgagagctgtcttcttactcaggggattgctcaccatgaccccagagctccctgcagaacctcctcccaaagcagacagaatttttgccatctccgtattttcctcaagatgagggatggtgatccagggaacaggaaactgaccggaaccaaagcagtagctgctgagggagctgctactgccagccaagctctcaggggatacaagagaaagaagacatgttccaggcttccagggcttaaacaaacaagataagaagaaactgatgaaaacttaatttcctctgaaatcttgtgtataagttcaaaataataatagaacttgtctggaatgatcttagggaatcttacctgctctgatttccacgagaaggtcatttgagggggcaggggtaggccacatttcatctcattagaataaactccagttacatctccagaaagacagagcttctgcatatttttttggccccaagggatgccacactggttgtcagacctccacaaggaaaattctcttcagcaaattgccagtaaacagttccttttgagtctctcagacaaagacaactgtttgggcttaaaaaacaaaacaaaacgaaacaaacaaatgctggccaggcacagtggctcacgcctataaacccagcactttgggaggctgaggtgggtgcatcacttgaggagaggagtttgagagcagcctggccaacatggtgaaaccccatccctactaaaaattcgaaagttagctgggcatggtggtacacgcctgtaatcccagctacttgagaggctgaggcaggagaattgtttgtacctgggaggtggaggttgcagtgagctgagatcatgtcattgcactccagtctgggtgacagagtgagattccatctcaaaaacaaacaaacaaaaaacacatgtctatatatccctatgtctgctcttacacagtgtcccgaggcagggagcaaaggaagaaaatctccattgagcagacgaagtactgggtcctgtagagagaaggtgaccttgcccagatcatgcagtgagttagcagcctgggagtggaagcacctctcctgattgctccttagaactggacaggggcattgtaagcagttgactggagtgggggcatcctctgtagggtgctgctgcagctagcccacttcattcacctaatagcaattgtgtggctactatagcccagcaactatttgttaaaagaaagccttagatgaattaaatttaacagagcttaattgagcaaagaacaattcgtgaattaggcagccccagggccagaatacaactagagagactctggcgctgctgtgtggttgaagacttatagacagaataaagagcatgaggttcagaaaacagaaatgaggtacggaaacagctggattggttataactgggggtttgcttttcttgaacaaaatttgaacagttagccacctttgattggctgaaactcggttatagttggccattggccaagaataggttatagtttgttcacacattcagttaggttgcagtttactatgtatggagaaacctttagggccaaacttaaaataggtaaggaggcagctttaggctaaacttaacaattccccccacaaaattgagacattgaccaaaatttcaggcattgatatcacttcgttgccatcataaatgtatttacttcgtctcaaatcccactgggaaataatcagaacagtgtgttctctaaggcgagtaaggattagagtagaggacacttccttgtgctggaatctcctatttactggagaaaaacaaaatttgatctgttttaggatgtattaaagtttcagtttgattattttgcatttagcatgaatgactccattttgttttggtcttgtcagctggggcctagttcacaaaatcaattcgaaagaatggcctccctttggttaagttctcaattaagtgagagtataactaacaggtctttaacaccactctcaggtatcaccattttgggtttttggtctcagcacattatttatagattacggtgtccttatgataacacatttatttgaatttttgttggtccagttgaagagagataatttgaatctttacagatggctgtatgcaaacatttaaaacttttgagagaatacagtgcaccagggaggttaccattatgactatcaagaggataatatcaagagtttagaatgtgctccgtaaccagggtctccatgaatgaaaccaactaaaattaaatagattaaataacaagctagataaagagtctacttgttttaaccaagcagccttttcattaatcccttacaattgaatttccataatacttgatgtattcctccatgtgtaacaagaagtatcagcaactgcacagatacttttctgtttagcaaggaggtaatctaaagtgatacttttctgtttagcaaggaggtaatctagagtgagtctattattcagcacaactttagcaagagaatttaaagtctactgtgtaaccataggctttatagcagaatatgctatagagcctatttacgagggagaaattttgaattattgtctcatttactccaaaccatggaaaaagagacttaacaagtcttgtccatctagaagagtgaaggcctccaaacaatgttctctttaacctatgctggcaatgttctctttaacccatgatgtaggttaagaggagtggatcagtgttctgtttctgactatgaatcaccaaagtatcattaaaatttgtttacccacattggccctttgtcttctgtctaccagggcataaggctatcgtaaaatcccttgcaaagaaaagtataccccatgagtgaacacaagagatcccctttttagttctgttgttcatagagagataagcaaggaaaaaaatgagagacgatagtcttgtgatagcagagaagccttgatccatgatcttgggaaaaggctgttgacgtctaggatgctatctgcttctagtgagaagctggttagctttatcttaatgtcttcaatgggtgtatagttccaagagtctggacaggcccttctgagctgtgaaactatgaacccaaaggttaaggtcctgagtttttttgcagtgtgggtagggcagtctttctctgatgtcatttttcagaagatccaatctctctatgaaagatccaatctttaacataaagattaaataaagagacaagctgaggagttagagagtgagtgagattgtgaatggtttgattgtccatgttttctgaggaccatgaaaagcttcttttatctggtgaaaatacactttggcacaatgtaataaagccttgcagcatttagtcatatcagagtttagtagcagaagatacatgaaattctattactaggtgcataggcattacagtgactattccactggaagtggatctgattgtcatgaatccacaatacttttgaccaaggcaatccagtcaattcagttggctttgcctaatgctattgtgtcagtaataccttatttaactattatacaacttgttcagtaaagcaagtacctctatcactggagatttgtccaggaataccccataaggaaaacacatttcctaataaccttttagctactgtttatatatcatccctcttgcataggaaagcttttacataaccagaaaacatgcattgaaactgatgaatgaaatccctctataaatgtttaaatggccaatcaggtaaatatatatatacatatatgtttcatttggattattttgtctcttccgtgatgagtcatggaatgcagaacttttaataatggaagctttagggactcaggaaggaccaggcagctgtccaggctctccattagtccatgcttaatgttagacttatatcctcttaaataccaattttgtttctacaatttaggtgcatagcactgtttattagatgagttatcataagtaatttggcttggaccatggagtttatttaaattgcatatctaaactttagtactggttgatttaacatgaaaatctggaagagtgttttcttggtattcaattaattcttgtcctgcttgcattagcagttttataagccagctcctttcttggagttctgggaattcttacccagtccaaatgatatgatcctaaaatgaccaaaaaccagtatttaagagtgcttttcagtgtccttctcatcctttttatgaacctccttgaagacacaatgatctaggattttactttgcttgtgaagagtttacagaaactgcatcagaattaagcaattaactataaaagtgatttaaaatggtcatagtgaaagatacaatagacaaagaaatttggtcatttttgtgacctactgttagaaataccaaaattgttagaaatagataatcggtgccacaaagaaaagtcagcacagagaccaaagatctctcagcaaggccatctttactttctgcagaaacgttgcttaatcacagatggaaaaatggcaagagcacacttgaacaaaggaaaagcagacatatttatcccttatgcatttgggttgtccttactgctttgtcctgcatccattggctagagcgggacctcacagtcttaaactgatacccgatttgctaatagcctaaaactttcctaaataggtaagtgcaaggaagagcaaagaagttgcttacaaaaggtttaaggaagcagtaacatttccatataaggaaggggcataggctgtgagcttgaatgtgcctgtgagcatgtccaacagttacataggatagggcttaacaaagagttattagcacaaagcaaggaggcttgaagaaagttaatctttaaaagaaactattgtttctaacacttatgatttattctttaacaagaaggggaactttgaagaggaaattttttactttttatacctacaataatttaatataaccataattataagtgatagaatatacccagatatatcagatttttaggaatcccatacaattttgtaacatatattaataacatatttataaaaatctattttgaagaaggttaaacatcatttcttatttgacaatgcctcccctggaatttaatatactaattaatcctgtttatctctttgttggatgctgcgggggctctctgtagcatcacaaagttagtttgaggccaaaaaaatacttaattttaaattttaaatttgatttgggaaatctatcaaatatataaaaggtttaaaacaatcaaaataggatcacaggtcactattaaataatagttatttatttagccaaagtgataattcaaagattttacaaagcaaaaactttttaatagagaggagactcagttttccaatcaaagaaaaacagcatgagtcagaatatttcttttcttctctccactctccctctctttttttcagtttataaaaaaggtgaacaaaaatattttactgtgacttattaatactacatgaaatttttgtttaaaagagaaaactgaattttacttttgtatttatgtattattaacactaaagttaattttaataaaccttataaataaatctatctaatcttagttagcttttgaccacaacagatttttataaaccttttataatctcttatgatttttaaaatattttctcttctcaattctttgcattagctagtgttatctattttttaaatttgaaacaacttttaagtaacttttaaaccagaaaatattattgttttaacaaatatattttatgcctttataactttttatcaaaaccacgtctttctgttgtttatacactctgtataaaaaattgtttttctcatatctagtggttctgattacatatattttcaataattttaactcttagtaaccctaatttctagtgaaaattctaggaagtaattttgaactgtcttatatcagtatttgtagatgaaaaccattttataattttttagaaaggtgtttcttcaaattactctttattacatttaaatatatttagctttttaataccatataaaaataagatgccaaagtatataaacttatgtttaattaatattttggtattttaaccttaaaatgactcagatactttataatgatctattatctaacataatataatttaatattttaagtttttgaaagtaattttggaactataacacaggtaccctccctaatgtcttttttagtcatcctgggtctcaagtagctacacagcacccaggatggctataaagaggagggcctgagtcctgaatttatatgccaggtatagagttcaagacagaagacattgctgtgaagatggtgcctggaggatcaaacccctctcagaatagccaggaggtaaagctggggcagagaagaaggggccatattaggcttgattctgcctcatagctgctagtctaggcactgagaacatgttcccaggcctgttagatatgagttctaaatttcttttcagagaattaatatgtcaatatgttaaattctttgccttctacttttaaacttaacttcctcataaagcaatctttttcaatcacctactccaccctgactcattccaatcacctgctccaccctaactcattctgattatctgctacctgctctgccctgactcctgccaaagcactcaccccatcattctctttaaattagccaatcggaattagtttagcctgtgcagtctaaccctagccaataggggaacaacacagcagcaggggtcatgtgcatcagggataagaaccccttcccctcccttgtctgagtgtgcactcaccatttttccatctgtaagggcgcacctttctatatagaagtaccttgccttgctgagaattaaaaagaaaattttatatttgagtgctattccttttgtggctccaaaactttatatataaacaggcctcaccatgatgacctattcagaatccaggtgtttaaaactcaaaatataagctcaaagtcaaatcaaacaaatatcaaaaatattacagaagcagtagtattatgaccttaaaacatgtaacaaaggcagcataagcctgtctgaccagtaaacccaggcaaaaatgtctgaattatatttaactgataattttggagccatttctattttactaacatttaaaatctagctttatttatcaaatattatcatatacacatgccacatagtgacatatagtcatacaaacacaaacagaagcagatcttatagtttttataagtaattcttacttgccagcttttagtttttgtccccatttagactgttaatcttttaattacttgttttattgccctaagcaattgttagctatgcaacaatttgccttttaaaaagatgactcaacaggttaaacaaggtagaaaatgtatatctcaaaagaatagagctaagacctgttcttagctctgtttgggcctaaatattgtaccatcatttgcttaaaccaaggaaaaaaggttgcatgtaaaggcccagttaagacaagatggccaggataggcgccgtaacaaagacctgtcatgtaaatttcaaacaatggtaacagtttctagtgacccaggcctccctctcagacacctttacaaatggaaatttccttcatagatttaaatttctcctataaaagtgtttacagatagccagttaaatgccagaaatatgtattttagttcaataggtgatcttttaaacttagctgttgttagctaaaattactgagtttagggtggagtccattaagaaatagggcatagaaatcattctctatccctggactcagcatggatagatcgggaaaagaagtgagcctactttacacctgtgcacatatcgtttataaacactttattcagaatagcttttttctgagccagagtcttgctctgtctcccaggctggagtgcagtgacacaatcttggttcactgcaacttccgcttcccaggttcaagcagttctcctgcctcagcctcccgagtagctgggattacaggcatatgccaccatgcctggctaatttttgtatttttagtagagatggggtttcaccatgttggccaggctggtctcaaactcctgacctcaggtgatccacctgcctcagcctcccaaagtgctgggattacaggcatgagctactgcacccggccagaatagtttcttttttttttcaccttcagctgtttcagaattcttggaaagctatttggctatgtcaaaaggcttcagaaagttaatacttcctggttttgttgtattaatacattgtgcaaccatcactaccatctatcttcagaacttttttcgtcttgcaaaactgaaactgtatgattaagccgtaactccccattcccctcttccctcggcctctggtaagcaccattctactttctgtgtctatgaatttgactcctccaggtacctcatgtaattggaatcatacaatatcttttcgtgactggctgtttcacttcagtgctgcccatcttataagttcttattatttttttaatgcatgtttttctttcctttcttttttgaggattctaaacatgcttaaagtctatgattttcacttcttaaagtatgagttcttctccctatttttggtttgattggctgtctttcttagcattcttgatattctttttcagatcttttggaatgccagcttactggttcaccttgaatggtaattgtgtgagtgcatgtgtgggtatgcatgcgtgcatgtgtgtgtggaggcatgtgcatgttagtgttcagtcctcatctaaaagttttgcggtagctttcaccccacttcctgggctccctagttcaattctggctttgtattggtgtctcaaggctcctgtccatggaaatcctgaggctattgtgggtccaatcaccaaggagcagttggcctagtctacttcttcactatcaggctttgtgaatttcttcttctctcctagatacaagatataaatcattgtcccaacaatggccagtcctagctcttttcagtgctctgccataggcagggtcccctctgtggagggtgcatggcaatatattcaagcttatgtacaaggcatttgaggtcgaggaatggaaaagtaccgaggcactgtgtgcatgttgtttgtgcatgcgactgaaactccttgaccctgaaaacagggcaaggaaaggaatgtgtagtaaggagcgctgaaaacagcctcctgagactatggtctatgtgtatttccaaggccatatgtgcctcatggcccaactgcaaagagccgcctggtggatgccttttgtttgaattgtagtttaaacaagctctctcaataaatattcggtggacagaccttggagcggcactctctcagaggagctgctccccgccctgctcagctggaattgtctgagtacttcattcttggcactcactgcagccacaagctgcaccctcagatgaggggttcacatcccttcacctgcagcagcctctacttgcctctggacttggagctgcgcagaactgtagcttcagtttcacttgccattgcatatttctgccttatctctggtcaatagagatgtttatctgtttttcaagagcaggcagtcttttaaaccgggcgcggtggctcacacctgtaatcccagcactttgggaggccaaggcaggtggatcacctgaggtcaggagttagagaccagcctggccaatatgatgaaaccccatctctactaaaaattcaaagaattagctgagagtggtggcaggcacctgtaatcccagctactcgggagactgaggcaggagggtcgtttgaaccccagaagtggaggttgcagtgagtcgagatcacaccactgcactccagcctgggcaacaagagccaaactccatctgaaaaaaaaaaaaagactttatctctcatcgctttgtgtatggcacagatggggaggtctcaaagggtgaactcagagtaaacttgatgcatctcaaccagaagtcccgagtgaccacttcttacttttctggctccagcttgtgggtgtgaaggaagggacattagcatggatgtacccctttggctgactgcagggtctcaggctccctcagccaactgtcagttctccccagctatttcctgggtaggcacctcacaggcactcacaagccggccactcacatccagtcactctgacagcctttggaggggatctcttcttccattgtcccatagtttgtgtctctttggaaagcacctcccagtgcaggggctctcccctgggcctccaaaattcacgacccctgaataaccaaataataccagaaccacaccaaattccctgcaaaattagggagagccccccaccttctttcttcagggtctcagatcagagttccagggcaaagctggagaagagactcacactctcccttgttccccaggaactatctgaagccccccaatccaacttcctccttagtggcaaatcggcctcaacaaggcaaactagctcaggcaagtgagcttgtcagacacaaccccactctgaatcccacgctgggctaccttctgcatgcaactggaaataaacaaacattccattttagcagtgattttaatctgggcaagtggattacaccgatttttactctttttttgtgcttttaggctttttttctaatttttaaataataataattattattttttaaaatcaagatggggtctcactctgtcacccaggctggagtgcagtggtgtgatcttggctcactgcagcctctgcctcctgggctcaagcgatcctcccatctcagcctcctgagtagctgggactataggtgcacaccaccacacccagctaatgtttttgtatttttggtggagatgggttttcgccatgttgcccaggctggtctcgaattcctgagctcaagtgatccacaaaccttggcctaataattaatgtttataatttgtgtaattataaaaaagtgtcattgagagaaaaaaatctctccttccaaaagttttgttagaaaaaagacgcttttaaaaatacattttctggcgaggtgcggtggcttacacctgtagtcccagcactttgggaggctgaagcaggtgtatcacttgaggtcaggagttcgagaccagtctgcccaacatggtgaaaccccacctgtactaaaaatacaaaaattggctgggcctggtggtgcatgcctgtaatcccagctactagggaggctgaggcaggaaaatcacttgagtccaggacacggaggttgcagtaagccaagatcatgccactgcactccagcctgggcaacagagtgagacttcgtctcaaaaaaaaaaaaaattttttttcatgtttattacttccctttaaaaacttgcattttgtccagatactaggatatgaactagattgttgtcagaactttggcaagtattgatgtgttgctccattgcttagcattgcttactggcttcctagctcctaggtaatcctaggcctttagctctcttcctgccaaatttgtcatgacctgactcctgctccctgctccagttctgctttcaaatgtgtgcgtctccaggtcattacctgaactgcttatagttcccaggacacagaatgcattctcatttcatgcctttctacacgatcttctagctgcccagaatgtccttttccgtttccacctggcaaactcctactcatgttctaaaacccactacagatcagtcactttcactgggaagtctcctcggttctcccttcccaatgctgtctcacaacacacttctgtatcttcatttaccatgctggattatcttacttgtctctgtgtatacaatcagggcctggatatagtgtttcctaagtatttgttgaattgaggcaggtttattcattccacaaacatacatggaatgcccatgatatagtgagcactgtgctagtttcctgggattcaaaactaatgaggcacagatcttgcctttaggggctcacagtccagagggacagaaagagacacacacagatagttacaattacagtgggtaccggcagctctgtctcacatcttctcattcttgcttttttcccttaactggccataacttgaaagtataattcatatttactgcttggcttatttcctcaaaagaattttctgtttcctacatattattcctgaactgatttaatgaaatgtgtttgtatttctctctttactttgccaggaaaactattgaaacagtcaaagtagcctccaaaattgctgctctccaggcatgggagcaccccatttccagagattaccaaaagatcactgaaattctgtagaacttgtcttgggactggccccaaacaaatgagaactggctgaatctgtgggtagaaaaatatgtgagtgacagcaaagaggcttccagtgagcccctgctggttcagaagacttgacatggccagcaccaaaggatccctttagggtacccccaccatgagccacatactgggagaaatttcttgtagcactctgctttaaaacaaaaccataatgataactaatcatttccctgattttggaaattaaccagagacatctaaaatcaccactaggacatcccaatctgcaccagatggccagggttatcagccaaagctgatctctttccaggcaaaacaaaaagtataaacactttgaattttaatcgcagagcagtattacctaagtaattatacaatttcccttaagtttaaaacaaaatagcttgcaggtcccacttttttccctaggctctatgggctaggaacctctgcaggtgactgtttcaatatagttgtacacaatatgttgagactgagtatagctccatgggtggttaactatacaatctccacagtcagcccaatgtagttgtaaaatttgtgctgagcccactggacacattacttcacctctctgtttcacttccctaatcaatagaatgatgccaacacccaccagatagggctgtgttacgaattaaactgagcaatacgtgcaaagttcttagcacagtgcatggctcagagtaagtgcttaaacatttttgttgataattgatattattgttattggcgaagtcttgcttgacttataagcagggcctgcctggagttgttggtgatttttttcacagtatgttcctagataacctagcttcaccatagtatttttgaggaaaggaaagagaagatactgggccagatggaagacagctcatccttcctaataaaactcttgccccattgcattccatgcttcctggttgggatttttctagaccaactcagccaccagttttatgagggactgtgggtgtgagcaggtctttaggagtcaggaagaggaggagtcaggggggtggctacacagtgcaggcagctcaatggacagcagtctttctgggacctgtgatctagaagacaggagaagatgaacacatctggagacccagcccagacgggccctgaaggctgtagagggtgagtggctcatttgtccagctttccatgccagggacaagggaaaggtgggattatttgcctttgtgggatctacaaaaggtaactgtgtctgccttgggcagaaatcagaagatctgagctctattcttgccttgctactagcaagctgggcaatcttggataagtcaccagccctctctgggtctgttttctcatctgtaaaataaagaactggccaagtcagtgtaatagcaatacccagcatttgtacaatgctttccagttgtacttttccaaacagcatctcatttggtcctcatagccctttgttggagagatgcttgtgggctggtcattcagctggtgcaaagcaaggctggacctaaaatcctggtctcctggggtaaattctggcctctggtgagcacattgttccccttgagctctgaaatctgaagattcccgctccttcctgctacctacagtgttaccttccttcccaccctattccctcaccacctagatcactctggctgtcccagtctcttctcagccccttcccagagttacctctccccttgcacaggcccaccacactgatcttgtttctgaaaagtgggaggtgaacagcagatacctcctccctgccttccctgcgttagcacttgcatgcagccctttttccagaattctctctgctttgtggaatgccttcccgagggtcccgagagatgaagaaagtggaggctgtttaacccctagggcagcatttctccaggtgcatgggtgggtcacccatgcgtgggtcacaagatccggggtgcaggtgaaatgtgcagattcctgcctcctccccaccaaggttggcgagtcagaatgcacatttttacaaactctcatgtttctggcaagaacatattgcagtttgggaaccactagtcattaggtgagtgctcttttgggccgtggagggctgccttgaaaccaccaaagggtggctataagtcagtgggaggtgtgaatgtctttgggggggcagtgatgggaaggcggcttcagctcagggacatgagaagcaggcactcgaagcttggagtctgcacaggcagtgaacgcccatcagtgaaggtcgaagcagagtcattgttgggtcgggggtggggagaagtgtgtggggctgggcccaggacagtggttctctggggctggtgtgaaaaaacctaggaagctcttaaaagaggctccttggctgatgttgaagccacgagggatgagaaggtctgatgcgaagctctcttcctcttttccagctgtgggctgcttctggtacacagggatagtaataatacctacctcactgggctgcaccaaagacagaaggggccaatatactaaataaagtggctggcacactggagggcctggagcccctgccttgggagcgtgcaggagctggcctatctcagtgggaggctgggtgggggcattgccctggcccttgacactcccagctacaggttctctccatgcctcatctcacccccctcctccacagtgagttgggccctgggagctttggactggcctctggcaggggctgcctggagcaccctccttgctgcctgcagctccagtgacttactaggaccacacatttataggcgaggagagagtgagaacctagacaggtggtccgcaagaagaacctgaggagtctgaagcctgggacttaggcctggctctgccccaagtcaatgcaggggccctgagaggacatctgtctgtgctccctgtgggaaatgggaatccatctaggacttgctgacttggaaagtgacgtgagttaataggcatgaaaaagagaagagaaaggtgtacatacctaatcatcatgtgctagacagacatcctatgccctgtcacaactctgcaaggtgagctatcactaacgcttttaataaatgaggaaactgaagcatgcatgcacacacacacatacacacacacactaaagcatatatgacatatgcatatatatatatacatacatacatacacacactaaaacatatatttgtaaaccaaaaataaaaatctaatcccctcagccatctgaatggacccctcctctcagcaaagggcattccaaagttagcctgaaaaactagttcaggccatcatgggaaggagggaccagacatgcctcattatactctcctcccttgtgggattactgatagaacagaccctttaagtctgatgagaaacatttatactctattgtctttgaagcctgctacctggaggctttacctgaatgacgaaaccttggtctccataaccccttattttaacatagaaatttctaagtatttatttatttatttatttatttattttctgagacagagcctcactctgtcacccaggctggagtgcagtggcgtgatcttggctcactacaacctccacctcctgggctcaagcagttctcatgcctcagcctcccaagtagttgggattacaggtgcatgccaccacaccaggctaatttttgtatttttagtagaaatggggttttgccatgttgaacaggctggtctcgaactcctgacctcaagtgatccatctgcctcggccccccaaagtactgggattacaggcatgagccactgcggccggccagacgttcctaagtctttagacaaaaacttaattcttttaaccaattgccaatcagaaaaatctttgaatctacctacgacccggaagcccctgcttccagctgtcccacctttccggacagaaccaatgtacaacttacatgtattgattgatgttttatgtcttgctaaaatgtacaaaaccaagttgtgacccaacagccttgggtatatgttctcaggatagcttgagggctgtgtcacaggccattggtcactcgtatttggctcagagtaagtatcttcaagtattttatagtttgactctttgttgatatattttatacacacacacacacacacacacacacactcaaatacatgccacacatatatagcataagacacatgcctataaagaggtcaaacagagaaacagaggtcaaataactggcacaggatcacccagcaggcacgaggcactttagaaaaccatggaagtgctgtctgagggtttcttttcactcagtaataccagcggctctgagaatgcttgctagaattcacactcccagggcccaaacctcagagcttctggtcctgaagatctggggctgcagagaatgtgcactttcaactcttgagatgatgcaattgtgggcggtccatggaccggaccgcactcatggagccccagaggcgccggttgctcaggcatcctagggaaactccaactcccatttgggtttcagagaaagaggaacaagcagcaggtgggattcctagggattggcagggagaatgggcaaggaggctgcagggccaggcctggggaccgggtacttgctcaggcaggtgagaggcagctggcggagttggtgtgagccagcaacagactctttaagtctgataagaaacatttacactctgttgtctttgaagcctgctacgtggaggctttacctgaatgatgaaagcttggtctccataagcccttattttaacctagaaaacgctgctctgatagggaattacagttagctgggacacaacctagggagatgctgacagtgcacctctcccaccaagtgaggaccacccccacccccacccccacaagactcttttgtgttactggacgcccaaagctgggaaccgtgcttcagagggcggattctcatctgatcagtgggctgtacctgttgagccacttgcctcacaggtgtgttctgggatgaggttgtgccgtgtaaaatgtttgttttactaaggtattaatttgctgggggataagaggccagtaacacccttgatatcaccttttggagaagctgccctggggagccacatcccgggccagagctcactgatggcacaggattaaaggtcaggggatggagagggattttttgtttgctctattctattctattttatattttattatgttataagggatgggttctctgttgcccaggctggagtgcaatggtgtgattaaagttcactttagcttcgaccttctaggctcaagccatcctcccacctcagctgctagagtagctgggatcacaggtgcatgctatcatgcctggctaattttttaaatttttgtagagatgaggtttcactatgttgcgcaggctggtctcaaactccttaactcaagcagtcctcctgcctcagcctcccagtgtattaggattacaggcatgagccaccacccccggccttgcttgctttttaattgtcatacccggcagtaacgaggtactccctcctcctcccgactgggatggtcagaggaggcccagtggagagtcaggactttgcccactgcccacctgccatggaagggggcagggagggatgtaggtgtggctgtgaaccggcaacttgagagagtcttgtggtggaaagttctgtatcttgactctatcaatgtcagtatcctctttgtgatattgtactacaattttgtgagatattacaattgggagaaacggaataaagaaatctctacattatggctcatacctgtatgtgaatccataattatctcaaaatgaagagttttcaaagattatcacaagaatggtgtatgctcatggataccatcagatcaatcatactgaggcgtaaagcaatacagaactgaaatcctctttctcccctccagtcctgcctctttaaggaccagtgctgacagcctgatgattcccttccacacagtgctactgtatttattcaaatcaattcacacctattatagataacgtgggcgggcttagctgttttgaatggcaatctagtacacagtggtggatgatggatatgggccattatgcagtaacacttttatttttgtaggatacattcctaaaaattgaattgcctgaaagatagtacaattcatgttctcaccagcactgtttatattggatattaccaatcttttgatttttggcattctgataccacttcccccaactacaaaagatataattgttataaatcccatttccccaggcatgagaagtgaattgaacatcttttcaaatgtttatcaaccaatataagttctctcttatgaattgtccttttatatcttttgctactttccattgctggtttctgtttgtttgtttttgcttctgtcaaacctataggacttctatgttaaaagaacactaacacagctgcaatttatcaatacctaataaaagcatttactgttattgttgcccttttagttgttgttattttataacaggtgtgaccattccatcatgcttattgcaaatattttccttcagcctattgccttttgaatttgttgtcttctgtcatgcagaaattaatttttacatatgcagatctacagatcattttccttaatgtttttgggatccctatcttgtgcccctacttaaagatgatacaaatttcctataatttctgctaattctcattattttatttatttttacatttaggcatttataatttgatcagaaaatgtaaataaaatagtatactgtagttatctaattattttattctgtgtagacattttgccaaaagcatttatttaattatccaacttttaataacaattataaatacaattttttaaaatttccatttgtaactgctttggctaataagatagatggtaaagatgtaaataaatatgaatatatatatatagatatcaatttttatatgcatataaatatagatagatatagatcattgattttggtctgtttcccttgagcccagaaactagccatcactaatacctagtatttggagattgaatttaatgcattaaactagagaaactaaataaacattgcaaatatcatagaacaagagagaaaattactagtttgtaaactaggtaatttcctcccatttttcttatagttttaattaagaatgaattttgaactttatcaggtgcttccttagcatttattgacataataaaaactatttttcttctttaatttgttgatatcaaaaattacgttgataggcgtcttaataatgaaccatccttacattactaaactaagttctaactaactaattaggttctaactaactaaactaaggttgggtttgttttttttttaaagtgaccttctagatttaattcagttatattttagttaaagctttgtataagttaaacttgtatagaatttccttttcatatgctcttttcattggatttgggtaaagcttgctttgtaaaatgaattgggaatcttactatctctttctatgatctaagatggtttaccattgggtttatcattctttgaagattagatagaactcagctctaaaaacaagctggccctgacattattttcaatggttgacatttaactgcccttttgaattctttttttttttttttttgagacagcatctgtgatctcaactcactgcaacctctgcctcctgggttcaagtgattctcctgcctcagcctccccagtagctgggactacaggcatgtgccaccacgcccagctaatttttgtatttttagtagagatggggtttcaccatgttggccaggatggtctcaatctcttgacctcatgatccacctgccttggcctcccaaagtgctgggattataggtgtgagccaccgcacctagcctaactgtcattttgaattcttaaataattattggtccattcagattgttaccttctttgggagctaattcatttctcttaaatccaccaaacatttgcacacagtactcttgtatttcagtagccctttccttatctgtaattctattgcctttctcagtattaatgtatatttgggggttttattctctcttttatccttaatcatgcttttcttcttagttttttaaaagaaccaacttgtttttcactatattgaggcataaatgatgtgccataatctgcatatttaaaatggatattttgacatggaaggtggcagcctagagaggagcctgggagaatttgtgaaagctcttcatgatttagaaagcacagtgcacatgcttggtggcattattaagtggaagctgcttctttagggtttgtttggaaggtccagctgactcatctcaacatttatatcaatgattgtcagtgttctgcctctgagcacatggatcctgagattggaaactttggttaaacccaagtgctattaagcagagtgagtaaatagtgaaagccatttgcgctgagagtgtgtgtctggaaagaaaggcagaaactctccagatgtcttccaataatgtcgaagtttttatcccaatgtcacaaggaaacaccaatggcttacccaaggtgacctcaaagacctgaaagcatttactgaaagagctgtgctttcataacatctgttatcaagaaaaagtgaagagcagctttctacatggtcaaaaaccagttgagaaagaaatacaattgaatatcaatgggatcgtgaaacctggcctcaatgccattctgggacccgcaagtggaggcattattagatgtcttagtttcaaggaaagacccacatgtattatctgggagatgttctgataaacacagcacctcaacctgccaatttcaaatgtaattcaggttacatggtacaggatgatgtcatgatgagtaccccaacagtgagagaacatttacagttctcagaagctcttcagcttccaacaactgtgatgaattgtgaaaaaaaaatgaatagataaatatggtcattcaagagttaggtctggataaagcagcagatttcaaggttagaattcaattcatctgcagtgtgtcagaaggaaaaagaaacaggactaatataggaatggagcctattactgatcctctcatcttgttcctggatgagcccacaactggactggactcaagcacagcaaatgctgacctttttgctcctgaaaaggatgtctaagtagggacgaacaatcatcttcttcccattcaccagccttggtattccatcttcaagttgtttgatagcctcaccttaatggcctcacaaagaggaatgttccatgggcctgcttaagagggcttggggtactttgcatcaactggttaccactgtgagttcaataataaccctgcagacttcttcctgggtgtcattaatggagattcactgctgtggtattaaacagagaggaagaagactgaagccacggagactgtagagaccgctaagagagataagtcactcacagaaaaattagctgagttttatgtcaactcctccttcaacagagaaacaaaagctgaattagatcaactctcagagggtaagaaaaagaagaggatctcagctttcaagatcacctaatgccacttcattctctcagatgggtttccatgcatttattcaaaaacctgctgggtaaatcccaggcctctatagctcaggtaattgtcacaaccatactgaggctgattataggtgccatttactttgggctaaaaaatgattctactgaaatcccgaatagagccagggttgtcttcttgaccaccagctggtgtttcagcagtgtgtcggtcatagagctctttgtgctagagaagatctttatacacaaatatattagtggatactacagagtgtcatcttatttctttggaaaactgttatctaatttactaccaggaagatgttaccaagcattatatttacctctataataatacgtgcattataaaaataatgctgtataataatcctaatcttgttaggattaaagacaaaggtggacaccttcatcatcatgatgttttccctcatgatggtgacttatttagcactggccatagcagcaggtcagtgtggtttccatagcaatgcttctcctgaccatctcttttgtatttataatggttttttcaggtctattagtaaatctcgcaaccattgcatcttggctgttatggtttaagtacttcagcattccagttttacagctttgctgcctaacgaatttttggaacaaaacttctgcccaggactccgtgaaatagtaaacaatactgtggctccccaatatgtactggcaaggaatatttgataaaccagccatcaatgtcttaccctggggcttgtggaagaatcatataaccgtggcttgtatggttatcttcctgatttgcctacctaaaattgttatttcttttaaaatattcttacatttccctttaatttactatgatgtgtcctcacataaaaaatgagaccataatttttaaaaaataaaaaggaaaagaataatttgatgagtgtcgagagacagtacagccctgttacacatggtttcactttctatggtttgttgcccatggtcaaccaaggtcaaaaatacccaatgaaaaattctagaatcaacagttcataggttttaaattgcagccattctgagtagcctgatgaaatcttgagcctttctgctctgtcccaccttggttcagtgaatccacactatacacgctgcccatccctcagtcacttagtcgctgtctcggttatcagatccacagatctcaagaagaagaagggttagtacagtaaaaccacatattttcagagagaccacatttacttaacttgtattacagtatattgttatatattgttataattgttctattttattactagttattgttaatttcttactgtagctaatttacaaattaaactttatcataagtatgtattatataggaaacacatagtctatatagggtttgctactatttgcagtttcaggcatccactaaggggcttaaaaagtatccccccacagataagggagaagtattatatgcatacatctgtaaaaccatttccataattgaaataaatgtatcattttgactttttttggttttctaataccttaatttctgactttatatttagtagtatgtacttacatgtgtgtgatatgtatttcattctttgtctagttgcttatgtgaaaactattacatttatttttaatatttatttagtctttaaaaataaaatcaattctcatttatgttctataaagtcactgcaaacgctgaattagcgaattcagaaccattgttcttagaaggaaatatagagttaggctcatgtgagcctcagggcacaatatttttgtcaaacgatcaataagttgccttgttttatgtgtgtttctatttaaagacacctttaaaatatgtattgttgattcgttgacattgaactcatggccaacagcactgtcacttgttcctgaatgaagctttcctaacacgtatttcctccatactgcacagtacagcctttgctcgcttagaaatgctagagagcaccgcaacattatggttgggagccgttttaaacagtgaaaacaccaacaaaaagcacaaaaatgtgaaaaatgtagtactagatagatcatgaaaaggacactcactgtctgagagctgaaacaagaaggcaggcatcgtcgccttgctcagcctcagtggggagcaagccattgggtgactcagtttccactgctctgtgcatgtccacagatgactacggatgggctgtgagtactgattcaggggttacacatcaattttaggaagtaggcaggtttgcaaatacaaaatccacaaagaatgaggattactgtagctaagtcatttagggttatgttacactcatgagctatagacaaggccattctcccagggagtcatttacagcaacaagaatctgtaactcctcactcactgcctcaattttggtttcctgggtcctaatgctagggaagtgtcctaatttcatcactcacctctgtttagatcatagtacagacagcccatctgtgagggttttagacagccaataccctggtgacatcatagaagacaacctgggcctgaagagttaagacctgagggctgaatcctggcttgatccatcttgtatcacaagcatttaagcagagggtggaggctttggggcagaatggaaaaaaacactggacttgaatttgaactctgtctctaacttgctgaatacatttagctaagttacctaattgctctgagcctatttcttctctgcaaaatgtcctggcccaccaggctgtcagagagaccaaaggaagtagtggtggtgggaaatatttggaaagcagtaaagatctgtgtaaaggcaagatggaaagtcattgtcatgatgttaattaatgcagtcgcagcatgccactctctgacctgatccccacagtgtgggtccacctcactcgggccctgtcatttcagaacctaaagagaagcaagcctgggccagccaactcaggataagaggaagagactgaggcatagggaggaggagaaacggctgtgggaagctccaatccacagccagaactgattgacccgattcaactcagggaggctcagggccctagttagagcaaggcagaggccctgggaccaccatgagacctcataaggctttggccaccccaagcccataaacctgtttcctttgcctcccagcaccatgagtgccgaggaggatgccaggtggctccggtgggtgactcagcagtttaagaccattgcaggagaagatggggagatcagcctgcaagaattcaaagcagctctgcatgtgaaagaggcaagtgttgggccaaggtggaagccctgcatttatcgttatgtggcctggttctcagggcatagcccttacagggagggaaagggaactccctggggttcctgaggtctccaccttgtagcgggctggcgggatgtttatggcaccctcccattcctcttaatagtcatggcctcctgggtcttcaacacatgaagttggaagtcagtagcttgtcaaatcttaagcaatatgattaacctcacaatttccactaggctcatgggcagagctgatgctctgacttaagcttcctctcaagataagcttgtcaatggtctatacctattaaagtcctgtctgctgtggcacactgttcccagtcctccagactccatagctaccctgcccaccccacacagcctgcatgccctgacacacagaggagacatcagcacggaagggaggactgagtctgaaatgccagcctctcctagctgtccttgggactggcattgaatagtggcctggtccttgacagggactagccgatgagcatctgaatgccctgcttgaatcagaaggaccctcccctgctggtcctggggatactactaagaactctaacgccacgcctcctttcacagcaaatatggggaaggaaaaaatcccattctccctaatgatacaatcccatccaaatgggagggtgtaaaacatcttaagacaaagagcattcgggatggtagagagtgataaaggtactacccagggatcctggggatgaagaagaaagccaaggcaaggtggcagttttgtcagtccacagcggacttcggcctatacctcatacttgtgaacccctcatagttttattaagtcagacactagagctccacagggtcctccccctgccttgaggggagcatcccaggacacagcatctttgggacacccatcatccaagcctgtcttcttaatttctgtgctcccagggtctaacaccaggcctggcaggcagaggctacacagtacaagactgctcagtgaatgaatgagtgaactggtgattaagaacaagccttaagtataaaatgtaggcagccttaagaacaagcaaaagaaaggactcagatcttccagtggaatctataagtccttcccagattcactcatcccttgcgctcaccccaagtggggtgagacagggctggaaggagcctgcaggaggaccctctgtctgaccctttcccatgttggttaaggggccacccagaggctgggatttaaaggctgatgggggtgattgtatgtaggggacagagagcccatgcaaattacaaagtccagtgcctgaagggggcctgaagtccaaaccaagcccatccttactgcagggatcggaacaggtcttccattagagcagatcacgatgggtgttcaggcacctgagttctgcctgaataccgccactctgtggtgcacccccccaccaccaccccagacacagggagacagtgaacaaattcaaagcccaggccctgcggccacagttgtgctgtcttccacccttctcgcccacagtccttctttgcagagcgattctttgccctatttgactccgatagaagtggcaccatcaccctccaggagctgcaggaggcactgaccctgctcatccatggcagccccatggacaaactcaaattcctcttccaggtgtatgacatcgatggtaagggctcttcctgggtgtgggctggggtggggagatcagtgggcctcagtgagaactggccatttcaccttggcaggcctggaggtgccatcccggcctcctgagcccagcctgggactggtttctccaggtgaggctgacacttcctttcctcacatctctctcccagtccccagtctctctgtctaatccctgcccccctttctggggcagcagggagaaaaggagggactctggcacaggagacaaatgccttctattcaacttaccagaggccagaacctttttctgatcttttctatgtctgaaaaagaaaatctctgttgttttttccttttcctcatagtataagctcactatgaacattttagacaatacagagtggtataaaaaagaatacaaaaatcacccgtaacattttgctatattgccttctaactggttgcacatacacacgccacacacctttttttttttaacaaaatgggattaaaaaatgaatcccattttttaatgggatttttcacttacaaaaatgaactttttcacttacaaaaatgaacattttgaaatgtaaaaatatattgctttacagtgtcatttttattgtggtaaaatatacataatgtaaaatttgccatcttaaccatttttaagtgtacaggtcagtggcattaattaagtacattcacattgctgtgccaccatcaccaccctccatctccagaaccttttcatccttccattgaaactccttgcccactgaacactgaatccccatgcctcctcccctagtccctggcaaccaccattctattcatacattctgtctctaagaatctgacttctctaggcacctcatctaagtgggattatacaatatttgtcattttgtatctggcttatgtcacttagtatagtatcctcaagcttcatctgtgtcatagcatgtgacagaattttattccttttaaggctgaataatattccattgtaggtatatgccatattttgtttatccattcaccaattagtggacatttgggctgtttctacgttttaactatcgtgattaatgctgctatgaacattggtgcacagatatctgtttgagttcctgctttcaattcttccgggtatatatccagaaggggaattgctggatgacatggtaattctggtaattctatttttaattttttgaggaactgccatactgttttccacagtggctgcattattttacattcctaccagtaatgtacaggtggtccaagttctccacattcttgctaacacttgtaattttctgcttttttttttttttctgagatggagtctcactctgttgcccagactggagagcagtggcatgatctcagctcattgcagcctccacctcccaggttcaagtgattctccagcctcagtctcccgagtagctgggactacaggcacctaccaccatgcccactaatttttgtatttttcatagagatagggtttcaccatgttggccaggctcgtctcgaactcctggcctcaagtgatccacccgccttggcctcccaaagtgctgggattacaggcgtgagccactgtgctcagccttatattctgctttttgataatagccatcctaatgggtgtgaagtggtaactcactgtacttatagtgtcatttttagtggctgcattatactccactgtatgtatcatgcagcatcgtgtagtatttaagactctaagcacaagctacctaagttcaaatctcagttccatcacttattatatgatcttagactagttacttaacttctctgtacctcaatttatttatcaaataggaattatgataataatatttcatactcatggggttgagatgaaggttaaattagttaacttacgcgcgacggggagccatcaaagtgtgttgagcaagggattcgcagggatggacctgcattctgaaaagcttttcttcagcaatgttcattttgctgccctggtgccagagggcggaaaacaggtagctggcttcacccagggatgggatattcttagagtcagtagaatggaaggttagagggagaaggaaggagaatgtgcacatgagaattattgtgagggaggaccctggatttgaaattggccaacagagagattaaagcagatagaagaggccatgaaggggccagggggagactggtcctctggatgagtccagaaacctgctgtcatcttggctgttgactaggaaagcagaacaggcggtgtgactggagagtggtataatatactctaattgattctgcatcgtaatgtgatttgggccggaatgatgatcacaacaccaatgagaatttccatgtatatgcaatttccttctcccagatactgcgttaggtgttttaccattatcgagtttccttgagctagttctgagagggagaaatgattactctcattttagagatgagcaaagtgaggtccactaccccagaggacttagagcccactattgcacagttaaggaggggcaggagcaggatgccacactgggtgtgtccatatccaaagcaggccaagaaatcattaatcacgggctctgctgctcaggaagaataaaatacagaaaaatctcatctctgttggtagttttggcttccttatcccatcactttcaaccacccatgtttacataaggccacactgctgggctggaatgcctagctgtggcccctctcaagacaacatgataaacagagcatttgctccaagttgaacaacaaggcacactccctcagcgctaacccacatacagtgtgcctttggataactgaggctgtgggcacaccgccccttatagattaagtaagcaggtgtattttctgggcagatagtcttggaagttgagtagtacttagggagttaccgattctggagacaggcaaccactgaagccaaagattctccacccgtggggaggtgtccattgctgttgagctaggcagtcgggaacatggaaggtttctgagctgagggtgacatttggtccttcagttgcatggtctatacccccaaggaaagctgactggcagaaagctggaggtgggtaaacagaagaggcccaccacttcttgcagtgtgtgcacggcagggggcgtctgcaggtacagagtggggtgctggggcaggcccgcactgggcttcatccccactcgggacaggcagtggctccattgacccggatgagctgcgcactgtgctgcagtcgtgtctgcgcgagagcgccatctcgctgcctgacgagaagctggaccagctgacgctggcgctcttcgaatcggccgacgcggacggcaacggggccatcaccttcgaggagctccgggacgagctgcagcgcttccccggagtcatggagaacctgaccatcaggtacggccgggtctcgggcattggcactgtccacggcggcgttagactcctggtcggaagtgtggcaggaactcaccgcggatccactctgccctaccccgccctgccccgcccctccccagtttagcccactcttgagtgtactgcagggcagctgtcttcattgcctccacttcctgcagtgtctctgcagaatcaactcaaggtctgaggcacctactgtgtgctgagcacttttgcatataccagtgcattttatagcaatactcgttttacaaaaggaaattacttcgcctgaagtaagttgcctaggatcacacaaataattaacaaaggtatttatgcaataaatgtttgagcagcttctatgcagcaggcactgttctgattaatgcagtgaatgaggtctccaccctgctggggctccattccagacgaagagacatgtcatttacaccaataaacacacaaactagagaagcacaaaattaataagtgctgtggagaaaataagagtgtaacagcaagacccaagtctgtccgactccaggctctgaatagagccggttttgtagttcattcttcctgtgtattaactttttttttttttttttctgagacggagtctcactctgtcgcccaggctggggtgcagtggtatgatctcggctcaccgcaacctccgcctcccgggttcaagcgattctcctgactcatcctcccgagtagctggtattataggtgccagccaccacgcccagctagtttttgtatttttagtagagacggggtttcgccatcttggccaggctggtctcgaactcctgacctcaggtgatccgcccgccttgggttcacaaagtgttgggattacagacgtgagccactgcactgggcacctacctgcctattaactttcttggggcttacttaccaaaacatatttcagattcttccatccttttcgactgcttcttttaaaattggaaagtaaagagaagtaataaaaatagcggtggttgtggcattaggcagaccggagtcccctttcagctccgcggagctgtgcgactgtgaccaagccacttgacctctctgtttcctggtgtgaagaaagccggcctgcttgccagacttggtcggccatagcttgaagggggtctttaagttaagacacaggtggtccccgccccaccgctcgcctctgagcggaacccgcctctctcgcagcgctgcccactggctgacggcccccgccccccgcccacgcccgcgccggccgcgccagctgacccgcgcctactggcacaaccaccgcagccagctgttctgcctggccacctatgcaggcctccacgtgctgctcttcgggctggcggccagcgcgcaccgggacctcggcgccagcgtcatggtggccaagggctgcggccagtgcctcaacttcgactgcagcttcatcgcggtaggctctgccagcacacggtgctctgaaaatgttaattaggagccgaggtgggctcctcctagacagagcgacccacagaggacacctggaatgccagggcagggtggcaccttagaaatcagctgggccaacgctcagagttggaggacgccgcccagagagggacagtagcttgtccacagtcacacagccagtaaataataacataactggcatttttgtgcactatgcaccaggcacggtgctgagcacgctccatttgatcttcacaactcccctatagtggacccctgtgcaggagcaccttcaagaggaaaccctagaagaggctttgaataccagaccatggagttggaatgtggttctctggctcatggatgaggcctctaagaggtgtttttttttttctttcttttttttcttttttttttttttttgagacggaattttgctcttgttgcccagctggaatggcacgatctcagctcactgcaacttttgcctcccgggttcaagcgatcctcctgcctcagcctccccgtagctggaattacaggcaaccgccaccatgcccagctaatttttatatttttagtagagatggggtttcaccattttggccaggctggtctcgaactcctgacctcaggtgatccaccctcctcggcctcccaaagtgctgggattatgggcatgagccaccacgcctgacctctaagagtttttgatcacacaactcctaccattaaaacaaaagccctcttatgcttatatgcatgctctattatcattagctaatagacttatggcacaaagtaactacaggggaagattcatcattgatgagcagggatgcccatctctagctcagatacgcttctggatatgagcttctcattagagtgggttttataggttttattttaaatttatttttattatttttaattattaatcttaatttttgtgggcacatagtaggtgtatatatttatggggtacatgggatgttttgatacatgggatgtttcgatacatgcaatgtgtaataatcacatcttgcaaaatggggtacccatccctaaagtgggttttgtcttaatggctcaacgagctaacaaagacttcattccaggagtgggagacgtgtgattcattttcttggtcacttgctcatgtattactaacacaactgttaatctgtggtttctctgctgggaaacttttaaagctacttgtccttcctgtgaggggtagttagcttagttttggtaaagtcaaatactgtaacctacaagtccacatccttggcaaacataaatatactgaaagcaaatgagcaatgagagaaccctggttaaccactctggatttggctcctgcaaggcacctcgagaactaacacaacacgtgcccatctgacatatggactaaatgagggcaccaagtcaacagagatattttatttatttatttatttatttgagacatggtctttgtcacccaggctggagtgcagtggactgatcataggttgctgtaacctcaaacgcctgggctcaagcaatcctgggctcaagcagtcctcctgcctcagccccctaagtagctaggattacaggtgtgtgccaccatgcccagctaattaaacaattttttttttctatagagacaggggtctcgctgtgttgcccaggctggtctcaaactcctaggctccagtgatcctactgtctcagccttccaaagtgctgagattagtggagtgagccactgcgcctggcccatatattaaatattagtaaaagcatagatgtttctcatgtgtttagacaaaaattaatacaaatagacattctgtaactttctcttcccgccacaattctggagatcctcctctagagaccccaggtatgaatccagggaagcaacaaggcatgggggcaggggactttggtgagtgtcctgttcagaaagcacagctagctcaggaggatgcagggaggtggctgggaaaagaggacaaggcagacagagagtgaggcagggctctctcccactctgcctggccaggtgctgatgctcagacgctgcctcacctggctgcgggccacgtggctggctcaagtcctaccactggaccagaacatccagttccaccagcttatgggctacgtggtagtggggctgtccctcgtgcacaccgtggctcacactgtgaactttggtgagtgatctggggcagggttgggtcggggagaagcttgagcagcctcaagcccagaatgcagggcccagcccctgtgtgtactgcctgcccaaagggcagagaaggggtgccctggataagccaacgctctggacaaaagtttctgcccgtgctagtatctgatggtgcagggtggggatcccaatgggaaggtggagtgggaagagctggtcttgcagtcactcaacctttctgagcttgtttccagtactccaggctcaggcggaggccagccctttccagttctgggagctgctgctcaccacgaggcctggcattggctgggtacacggttcggcctccccgacaggtgtcgctctgctgctgctgctcctcctcatgttcatctgctccagttcctgcatccgcaggagtggccactttgaggtgccccagttgctgcccttttgcttcccccaaggccagggtcctactttcatttctttctgtgtcccctctgatttactccagagcccaggaaggtcccaagctggtctgcatattatttgcatgtgatttgggacctgctgctgtgttctgccactggactgtagtttatgtctgccaagtgtagatgttttgctgcggaagagtctgcctttttgctggcttatccctttagcctatttggattaagttgggcttaaaacagtacagggaggggaaggaacataggctcagcaggttttgaatccccactccactgcttactggtcgctcaacctttccaagcctcagttctctcatctgtaaaatggaggtgtaattctctatgttattttaggaattataggcgataatacatgtaaaaccactaactacatcctagcacataggtgctctgaaaatgttagttccatctttgcttctgtctctccagcctcctcaagatgcagaaagtcacagaggacttggtttggagagcttgactatcttgtggcctgaccacatcagaaatagacatatactgagcacgtacctactctgggccagcaacaagcctttgaagtaggaatcagaatcctcatttgacccatgaggaatttcacactcagaaaagtaatgaaattgcccaagatcacaaagcttcagaaggtgctaaaattgtcttctgctatttcttctccactcccaggaagccattgctgtctttcctttcttccttctgagaatgggtcgggggtagcgatactgatgctcatgatccctgtgggggcagtccactctgcccagaacctccccaggcagatatttcagatgtttgcctctggtatcaggaatcttcccttacagcctcctttggccaagcacccagaaaaagaagcttcccagccccaacatcttacccaactccatccccgggagagagtcaaggctctgagcactgccctggctttgaggataaccctgagtcctggctctgttccaccccccaggccttgagctctggaagttgactgccccccctacccccataggtgttctattggactcacctgtcctacctcctcgtgtggcttctgctcatctttcatgggcccaacttctggaagtggctgctggtgcctggaatcttgtttttcctggagaaggccatcggactggcagtgtcccgcatggcagccgtgtgcatcatggaagtcaacctcctcccctccaaggtacaaaggtgggggatggggaggtgcttttccaactcaccccaagggacagtttgtggggtggagcagctggataccctgtcagacccccaaggaaatagagaatagtgtagctgcagccccattgctatggaggagagaagcaaaatgcaagacccagtccagccctccaggagggaagctttaggaagatgaatggcagggcaggcaataaacctctaaaatccgattttggggagaacagtctccttcagctcagtaagcgtttattagtgcctacagggtgccaggccctgaactaggttacagagaaatagagaaggttctgcactgtcctgctttctaggggagccagccctttcattacagtgcagggctgtgttgctggaggtattaaaccctttgtctttgggaggtcagaaaaagcttcagaataagggagaagatgccatatcagggttttgagggatgaataagagtttgttggatagagaagacaaggaagggtattgctggcaggaggaacagcacagtaaagacacagaattgtgaaagggtatactgtgcttgggggaccacaggtaatttggcatagctggagccaagttgccaggaggaagccagagaggtgaggaaggcctgattatgaagggcctcctgagctgggagaccaaccccgcaggccatggggaacccctgagcacgctgggaggagatggtggtattaagctgtgaccattaatattctagttagatttctttagttgctctgtggaaggtagcttggagggggcttgtggggaggttcttgcaaatacaaagatgagagttcatgagggccttgacactgaggcagtggccatgggatggaggcaggtgcacatcacagaaagactcaagaagcaactggttatgttttgcggcaacagagaggatggagtctaggacgtctcccaggtgtctgagaaaaggaaggcagttctaggcgggctcagctctggacacactgcgttagaggacctgggaggctgaagaatgaggctgtgctctgtgtctaggctctggcatccaacagcctcagctgcattcagatcccacggtttcttacccagtggccttgggaagttatttaacctctctgagcctcctcttcttgtccctaaagtagagagaaaataatatccacgtcatacaactgctgtgaggcctagagataacacagtgctccaaagcaattgtctggaaagatgttgttatccaaggagagatgcccattgatggttagaatgctagccacactctggctgaagttccaagaaagggctggagtagccagggaggcatcacagggatacgtcacagagggtccactaaaaagcagtgcttacaccctgagaggcagggtaaaaccaggggccccaattcagacacagcctggctgccccctctaggattgttgcccacttccagattggcaggttggctgctgaggtgggccaccactcagaagcacagaagagtgtcatgtctcggggcatgcctgttttatggaggaggagggcagcccagcttctgccctcttgtcctgtagcccctggtggctttgggcctgcaggaatgatgcagatctccttcctctttcccaggtcactcatctcctcatcaagcggccccctttttttcactatagacctggtgactacttgtatctgaacatccccaccattgctcgctatgagtggcaccccttcaccatcagcagtgctcctgagcagaaaggtaatggccacctcctccagtcactctgcacatattcactgagttcctaccgtgggccaagtacaggctggaaactcggaacacagcactgaacaaggccagaaacacaaagtcagcctcaaaaagctctctttgaagtgggagcaggcatgcagacaccgattggcatggcaagggctgtaccagctgcactgaagtcttacagggagggcctggcttggtggagagaagcctttgcagacacaggggcattcagctggactttgaatggttagcaggagtttaccagatagggaaggagatggggaggaggcagagggaaaagcagaagtaaaaacatgaggacctggaaactcagaagagtcttctgtaactagagctatggggggtggcggggggtaggcaggtggagtagcaaggaaagaagggagggacatacagagagagaaaaagagcatgaaaggcaggtgatgtggctggcaaagccagttagagctaggatgggactaaggaggacttcagaagcaaagttggaatccagatggatggagcagccaattgggagccaggaatggttcttaagcagaggagtagccagctcaggagaggatataggcatttttaagagggctgcgatgggagaccaggcttccctactcccacctggacttgggccttatagagccccaaggcagcagaatccctcacacccttctccagccctgaactattcccactgctttttgggttcccagcacacacagaacagttcagctgatgctttgctcagctgtcctctgactctcacccgtgcacgtgccttccttctggtcccaggctgtttttagagctgctacctggacctctgcccttctggccaggccaatgattggccttcccaccacgagaggtgcctccaagtatgacaagtgtggcttgcactgacatttccaacagggaaggccttgagtgacctattacagtaagaccctggcttggcttcatgaggggtatccagccctgggtgctgggggttctctgactcatcctggttacaagctttagtgtcactcaggatgcctcccagacccagcccagcaggacccctggcccagatccctcagctcacgatgtagacccaaggccagggtttccccatgtggggctgcataccccctaccttggaatcacctgaattgtgccctcaatgtaccacggaacaaagttagaggttggagagggtgaagctattttctccctatttttttccttttcttttctactttgtaaagaacgtctatgctctcagagaactcagacaatatcaaaatatgtacagaagaaaatgagaatccttcaaataattttatccaaggaaaaccattgccaattatttggtgaataggcttccagctctctctctctatctatctatctacatggctaatcagatggagagattttgtatacatgggctcacactacaggcagtgtttcatagcagcacactttttcttagtgaacagtatgtcatggagatctttgcatatcagtgaatatacagcttttcctttttgtggctgcatggtattccagtgtgtggatactaatatggttattgactattattaatattatatgggcgtgtcatgtatttcaccaattctttttctcccctaactttccaaacttgttatatttcaccagttcttttttttttagagtctcattctgtcacccaagctggagtgcagtggtgtgatcttggctcactgcagcctccgcctcccgggttcttctgctttagcctcctgagtagctgggattacaggcacgtgccaccatgcatggctaatttttttgtatttttgtatttttagtagagtctggatttcaccacgttggccaggctggtcttgaactcctgacctcaggtgatccacccaccttttccaaagtgctgggattacaggcataagccactgtgccccaccttcaccagttcttgaagggatttcttctgggtctcagtttggaatctgcctgtccttggaccctgggagagtctcctgccctgagctgagagggttcatgtgggggctgataatataccaacttcgtttacagagcttgtttactggagtcaggagtgggactcagtttagcagctgtggctgaatgaattcaaccaccattcttggagacctcctaggtctgagtcattgcttgaggcacttcaagcgacttgggatgctgatgccttaatgaaggaggaaacctcagagaggtggatggagctaggatcctagaacttgagctccagtcctgacttttcaatccactcctcataaactatgaagcacctctctaagcctctgtaaaatgcagagtaacaccaggtcatgaattccttcatcaacttgaatggaacatctttatttttactaacctctaactgaaatttagcattttcttcaatgataaatgtgagcaacaaaccccaggagcattaatgatacctctgactttttcacggtaaaaaccatggatgcctttctgtatgttacagttgtggccaatgcttcaagagtatttatgctcactactacttctgattcccagggctcgttgggtcctgctacagctcattaattcatgtattaacaaagaagcacatggattcctaagtcacaaattttttttaacattttgataactaattataactggattcatatgtaatttctctgtatattactttatgtcaagcttgtccaacctgtggcccttgggccgcatggggcccaggacggctttgaatgtggcccaacacaaattcataaactttcttaaaacatgatgagatttttttgtttgtgtgattttttttttctttttagttcatcagctattgttagtgttagtgtattttatgtgtggcccaagacaattcttgtactcccaatgtgacccagggaagccaaaagattggccatccctgcttcgtgtatttagacccttattctgagaaggagactatccactgccttcacaggactgctaaaagaatccctggtttaaaaaaaaaaaaaaaggaaaagggcaagagttcaaagcaggagatctcttgcatcctcctcactctgatgttgtggattctatttggtaccactcagcagaagagtcacgtcacctcacaccacatttccatcagtcattcattcaacagatgaccttagtaagcacctgctacatcccaggcatgggtatcatgaaagcagttggtaccaccatggactgagcgcctactgtgtgcacaaccattgaatagcaggagggcctgttttggtgagtccttggcctgatgaaggtggcagagtccctgcctttagaaaattcctagtgagctgctctgatcctttctttggtacaggagtctgtacccttattaagctcaggttgacttcatcaagaaagatctcaaggtctgccccacagagatcagctctccaagtcctgtggctatggctgctagtctggtcctgaggaaggacattcaaaccaggacttggagggctgaggcccagcagcaatccctccagtggggtgaggcttgctccctggtgccggtcactatggacctcctttcccctcccactcttctctttctcagacactatctggctgcacattcggtcccaaggccagtggacaaacaggctgtatgagtccttcaaggcatcagacccactgggccgtggttctaagaggctgtcgaggagtgtgacaatgagaaagagtcaaaggtcgtccaaggtaggtggctactggagggaaggggtccactctgctggcaagtccacagagaccaagttgcctccttcttctcagtgagcatcaattattgagcaactgctgtgtacatagatggcagcacaagggggttaggcaactgctaactccgtggtccaagaaccttctcgaagtctgaccactccagatccttcccagtctgatgtcccccattagaagggggagagagcaacagaaagagagtggaaattgaaatcagaaaatcccatctccaggtctctgctctaatactttctaactgtgtgggcttgggcatgtcttttggtttgttcatctataaaatagaagtcgtttcctctgttacttacctttctcctgtgactattttaaaaaccaactgaatgaatgcacataaagtattgcttgaaataggcagcctggtccaggtgggcccctcatcatcatcatcaccatcagcaatgttattctcttttgagccttgatgaaacctataaagctgatgagttgctggtgtcatcaaggctttggaggaacagagagagacagagcaactgctaaagaaataagaatagacgctgaggccgagggtggctgaactcaaactaagtagactgtgcctcctgactgggatacaggttaacatatgaaaaccctgccataggagacgttcccaggcctggcccaaccctaccttgccattggggaatttaaaatccagagttgaaatccaggtgagatcctgcttggccagaccagaggacctttccaggaccacaccaggagcaaaggtctgggatatgcagggataggtaggagaagcagaacgttctcggctgttaatcagggaaacttcctgaaggaggaagctgactttcaaaatcagatgagtcatggcacactgtggatcaatgggctagatacactaaaagctgttttcttgggacctcagtcacctctgccactataaattggcgcaactttctggcaggcagcctggccatatgtgtcagcattttaaatatgtatacctacacacccagcaactccattttagagatgtattcttaaaagctaattgggggccgggcacggtggctcacgcctgtaatcccagcactttgggaggccgaggctggcggatcatgaggtcaggagattgagaccatcctggccaacatggtgaaaccacgtctctactaaaaacacaaaaattagccaggcgtggtggtgcgtgcctgtagtcccagctactcgggaggctggggcaggagaatctcttgaacccaggaggcagaggttgcagtgagtcgagattacaccactgtactccagcctgggcaacagaatgaggctccaactaaaaaaaaaaaaaagctaattggacaggtgcacacaaaacatagtaatttccttgttcatttagcaaatatttatgaagcacagcatctgctattttccaggttctgttctagatgctggagatctatcagtaagcaacataggcatagtcactgcttaccttctggtggggagacagacaatgaacaaataaatatatgcataacatctcaggtgataataaatgctataaagataaataagtcagtgtcaagaggtagggatgggaaaagtgctatttcagagagggtggttgttctcaataatgagaaaatgaggctaatcaaaatgccgaacaataggaaaatacctaaataaattgctgatcacctttacaatagaatattaagtctcctaaaaaaaatgatttggtcaatttaaatgtatttacctggaaaaccagtcaagatgtagtaagtggaaaaagcaggttactaaaaagtatgctccatttatgtaaaagtgttgtgtatgtctgtgttagaaaaaaatctgtaagggcatagagaaaatgttgagtagttatgtgctctgatacttttttcactattgtttaatagtttctatatctgcatttttaaagctaacattatcgatttgtgatttaaataataaagaaatttctgttttgaaacaaagcagagtgtacagcccccactcatccagtcctgcatctcagcacagggagttgtggcatccaaggatgtcactggagctgacgtcctataggcccaagggagatccctggccgcaggacgaagacctggtgtacacgaagacaaaggaggagactcacacacagtgggaaacttcttctgaagacagtggcctagtaaggctgaggaaggtgggactagagacaggagggccagctggcttatcttcccagggatcgtgggtccttgcaacatgccttaagggcaaagccatgttcaggaagtatgacacatcacttggatgtctctgaagccaatcatctgcctgctaccttcctaacttttgcgtaagaactgccccagtaatactttctacttagtatttctcttacatcccaacattactttaaacttaattgtattcaaaacaagtcataagattattatctctaatggaaaactagtatcgcatgctgcacaggatagctctgaaagtaaaaacaatgagaatcaatgttattaaattcttgctagatggcctgtctgctaaggctccatgccagaggtggtgctccacactcttactccttccttccctcccttcctcccttcctccctccctccctctcccttctttctttctttctcttcctttcttttttctttctttctttctttctttctttctttcttccctttctttcttttctttctttctttcttttttttttctctctctctctccttccttccttccttctctctctccccctccctccctctctctttctttctttcactctttctttcttttctttctttcctttctcactttgtaaaaaggaaggaaaaaagagaagagattagtaagtgttagagaggttaaaagatgcattagccagaatggaaggctttctcgttgccatcagaaggactaaagaaaattaaaaggagaagagctgtctcacagcataactctcaaaccaccgccaggagttcatgccccacaccagggggagcagccttcagtcatctcgggacaaagaagcaacacagcgtgatgtcacaatcctggacaggcagcaggagacccaggctctacccgagctctgtgggaatgtgggcacgtccttcccatgctttcagcctggatgactgcgaaggtcactcctaactctgcctcctgcaccagagcgggaaatagcacaggctccttcaggcctgttctggggtctgcttccttcaccttccagaaggaaaggcattgacttggacagggctgtctgactgtctaccacgctctaagtcctgaggaagacagaggaggcctgctctcttccccgaggagcacactgtctgaaccccagagcaaagccctagggcctggggagctgtgagccaggggaggccctggcttctctgcttggagaaggtgggaagagctttgaagaggaatagcaacttcaaatgagctggacaatgaaggatacagtgtacactgacagaatttgacagctggggaagaggaaagggtgtttcaggcagagggaaaagaatattccaggctagtaggggaatgctctccagtcacaccctgaaactgacttgtgctggaccataggagccactgttaaattttcaggaatttcatgagctggttgttaaacacagttgttatggtgggagccatggtgggcaggatttacaccacagaaatgggcagaagctaacaatcaagactgttatcccttcgccagaagtcagtttaccagcacatccctgatgttctctttcaaaagagcttcgtgttccctgaatggtttgggcagaaaaagcaattccctttttataaagttgctcagactggcaagggcaagaaacttctaagaaatccctaacactgtccattccaagacccataactctctgctctactccctgcagggctctgagatacttttggagaaacacaaattctgtaacatcaaggtgagaggctgcaggggtggacgtgagcaataatgcctgccccaaccaaaggaaatgaagtctttgcctttaaggaggggctgttgtggttgtgggtactcaagctcctcaaatcctcatgggctgacatccaggtatccgggtcatgtaaccacatccctccccctgctctttatatccaagggtgctcagcctcaccctcagcctgtctcttcaccaggagcagggatgggtgtacagtgtataggcctacgtgctctccatccctgtctcctgggcacccacggcacacaccccagggatgcgaattgggtccttgttttcactagctctgcactgtaacacctagagctctccccagactggtgctgagagcacaggatgtggaaagagcactggagtgggagccacttagacctggcttccagcccaggagatgtctttctatatataaagggggttctgaagccctggggacatcccctggtagcaggggagaccagcgtcaccccccatctctcttctctgatgccctcttgtgcacagtgctacatcgatgggccttatgggacccccacccgcaggatctttgcctctgagcatgccgtgctcatcggggcaggcatcggcatcaccccctttgcttccattctgcagagtatcatgtacaggtgggtgaacagtgtgctcctgcctgcatcctgggtcagagccccaaggcgccctccctgctcctcctccctttattccttctccttcctctcctttcacctgtctctctctgctcttctctctctttcctctcctgctctgcccccctctcctttttgtgtctcatccctccccttcctcatagagtgggctctgccaccccatccttgctccctgtcccctgaactgttctctggggtcctgaaaagtctcaccccaaatttacaaccccttcctcctgcctcccctcaggcaccagaaaagaaagcatacttgccccagctgccagcactcctggatcgaaggtgtccaagacaacatgaagctccataaggtgagtaccacctcctgcaggcaggcctccagaccttctcccctggacaactcctaaaataggagcccatcctcctgtgcaaaggtgggagcggataggtgatccctaatgggatctttctttccccacaataccctgaattctcttaaatgagttatcccggtgcctcctgaatgtctgagctccgcccctgcttcaacattcccatcacttctgagagatgttcttaacatttcattaaatgttgcaaagcttgacagctaggcagtctggattcagttacagccatgatgctacctatccatgaccctatggtggttttaagaatgaaaacatactggctgggcatggtggctcatgcctgtaatcctagcactttgggaggccaaggcaggcagatcacttgagcccaagagctcaagaccagcctgggcaacatggcgaaaccccatctctaacaaaaatacaaaaattagttgggtgtggtggtgagcacctgtggtcccagctacttgggagactgaggtgggaggatcacttgagcccaggaggcagaggttgcagtgagctaagaccacaccactgcactccagcctgagtgacagagtgagactctgtctcaaaaaagaaataataaaaataataataataattaaaataatataatcaaataataatggaaacatgtttgccttttgaaaattcatcatcctgtataggccacttagaagagtttcttaaaaagtaatttatgtttttctggctatcctaagctagtatttcaacacactgtttgttgtaaacaatagaagatattagagaaaatccccgccttggggtcagaaacctggttctggtcccatgctgctctgtgatctgggcatggctgctcacctctatgagccttgatttttccctcccttaaatgggtatctgaatgttccctgcttacttcagggtggtcatatgggtcccagggattacagatgtgagcctcctgcaaatcagggagacccagcctctgagctgaagggcctctctccgtaggtggactttatctggatcaacagagaccagcggtctttcgagtggtttgtgagcctgctgactaaactggagatggaccaggccgaggaggctcaatacggtaagagagggacagggcctgagggcagtaggagtagggcaggggccttcagcttctttaaaaaaataatttattgatatgaaactcacgtaacctaaaatgaaccatttaaccattaaagtgaacccagagtctttttttttttttttttgagacaaggtctcactctgtcgcccaagctgaagtgcagtagcacgattatggctcgctgcagcctccacctcccaggctcaagcaatcctccaccttggcctccagagcagctggaaccacaggtgcaggccaccacttccgctaattttttttttttctcgtagagatgaaatctccttatattgcccaggctaattcagagtctttttaagaggtgtttattccatttctggagaagtaggatggggggagattctattaaaatgtaacattttgtaaagttgaaaaatagaagggggaaaaaaaagccctcataatctcatccagctatccaggctatccagatgacatcaggcattttaaaggattcccttccaatttttgttttcttattcatattttataaaaatatatttctttatttttgtaatttatctttttcatgacatatcttttaattcagaataggcacatgttgaaaatttaaattcctaggcctcaccccagatcttccaaatcagatagattctctgagagtcaggctcagggatgtacattttaacatgctcctcaaacgattcttattcacactaatttgtgtttggcttttgaagtataatttacatacaataaaatttaccaatttaagcgtacaataaatacaatgacattttgacaaatgcatacagtagtgtaaccaccactgcaatcaaaatatggagcatttctttccattcctcctgaaaatttcctcttcctgttttgcagtcaacaccctcccctgacttgtaacccctggcaaccactggtctgctttctatcactacaattttgccttttacagaattttacataaatggaatcatataatacgtagtctgttccgtctgacgtctttcacttagcataataccttcaagatttatccgtgttgttgcatatatcagtaagtccattcattccttttcattgctgagtagtattccattctatgggtgtaccaccatttgtccaattatcttttaaaaagaaatttaaaaatcagaaaagcaaattttttatttttatacatatatttaccatttctggggtcttttcactttttgtgcctggattgagatttccatctgggaaagttttccttctgcttgaagaactgatggttctttgtaatgcaggtctgctggtgagaaactcttttggcttttcactgcaaacaccttagctctgtcacccaggtgcaatctcggctcactgcaacctccacctcccaggttcaagcaattcttctgcctcagtctcccaagtagctgggattacaagcgcccgcctccacgccaggctaattttgtgtttttagtagagaggggttttaccatgttggccaggctggtctcaaactcctgacctcaagtgatccacctgcttcagcctcccaaagtgctggaattacaggtgtgagccaccggcctggattttatgttatttctttaaatagtactgcacttcgttctggtgcacagttaaattatgtaagactgtggatcttcttgaggctcacttttaacttttattggggtgagtctagagcagcctttagtgcgggattaatttaaccccagtactaaggtgatacacttctgaggactccacctaatgcgctatatacggcaaagcctcttcgcttttagtgagaacaccaactattcccagctgtttaagctcgaggtatcgtttatcctagtttttctggtcattttctttcacacattcaaattaatgctcagccagagacttaggagaaactatgcagattttcagagcaagtgagtagcctcctccctgcctcccctcctccctgcatctctccttctctccttctcaccttccctctcttcctttctgcagttcacttttccagtcttgtgcttaacattctggctgtcctggcctctgtgaatgccagtttctgtctcctctcctctcctcaggagactgcatcaggcaataagcggggctgttgtagggcttacttcgtctgtttctcttctctcagcaatgatagtcccgtgccacctgctgatcaatgtctggaaaccattgtttcatgtgttttgtccatttttctggttgtttcaggtggaagggtaaatgtggttcattttacggcaatgtaaatttttctttttttttttgagacagagtgtgtctccatcacccaggctggagtgcagtggcgctcactgccacctctgcctcccgggctcaagcgatcctcccatctcagcctgctaagtaactgagagtacaagtgtgcgccaccatgcccagctaatctcattttttgtagatgagatttctccaggttactcaggctggtcttgaactcctgagctcaagtgatctaccagctttggcctcccaaagtgctgggattacaggcatgcaccactgcacctggcctgcaacatacatttttgatgtacacaagctgtgagtagagacaaacatggatacagatatatatttatggggggtgagtgctcaaccttttttctgatgaaatgagaataaaaagtttagagagtgatctaagataaagattagacaccctttttccttccattcctgttttttttttaaaaaaagattaaataccttaacatacatgaagtcattaactgtttggtcccttcttttatacttttatcaaaaatgaatgtttggcctggtggctcacgcctgtaatctcagtgctttgggaggccaaggtaggaatattgcttgaggtcaagtttgagaccagcctgggcaacacaggcacatgctgtctctacaaaaaatgttttttaaaaaactagctaggcatggtggtatgcacctgtagccctagctacttgggaggctgaggtgggaggatcacttgaggccaagagtttgaggctgcagcgagccatgatagccctactgcactccagcttgggcaacagagtaagaccctgtctcaaaaaaaaaaaaaaatagaaggtttgaatgtcctcccctcaacctctccaacctctccctcctcactgcctaagtgtttgctgtattctacattttttactaagcatttactctcatcattgttaagtatgataaaatatttctctggatcatatcatagtcttcatgggacatctttgtggaatactgagggtttacactgtatttaaatgttaatctgttaaagtcattgttttgttttccttataatttatacaagaagaaatatctttagatatgtttctaactttttaagagaattggcatagtgttttagacttgttgagttcattagaactagatcgtatttgactatttaattatcacaaggttgtcatgagtgaattcaaattcctatgataaacacagtttatacattcaaggaatcaaacacaattttctacaagaaactatccaaacagatctagtttactataacaaacattcagagccttaaagttcaagtcaacagtctttggaagataactcttcaagcttagactagttcagtaaagctccttgccctttcttgtaaataacaattacagcaaatatttatataacattgacttcatttttctaaatgcttttacgtatattaattcattagaaactcaattttatgatgacaagctaaaggaaaagtttaaatttaatttaaattttctagttactggcacataaatatttgctgtttgcttcttcctaatctgtgtaaacaaagggtaacagctaacccagtgctttgcattctcaaagccactcgagtcaacaactctatcacatcaaatttctttcagggtttctcattaactgcagctgaaacttgtggcttctgatttcaactttaattatacgtcaaggtttgcattaaataatttttggtttataatttttcattgctatagcttaagcgtcaattattctgtctaagtttgtatctttactctacccttaataggtataggaccttgggcatattatttaactagtttgccttgaaagcagttatctgaaaaatctggatgctactagtacccacctcataggattgtcatgggaattagatgagatgtcatctgcagaacacatagaacagtgactggagcttaataaactgcttgataaatttagtggtggtggtggtggtaatagtaactgcttaatacatttatttgtagtagaagtgctagtagtaataagtgtttaataaaagtagtagtagtatttaatggctatataatgagtggtatagttagtggttataccgtaaattatttaaccaagctcctactactgtacattttgtttattcctcattctccataatcataaaaatgccaaaattaatatatttgtgcacatagtttttttccttgctttggatgattttcttaggaaagtgtcccagaaatgagatggctatctcaaacacagctggatggagagagtgagaaccatgccaggtcatcctccacagcccctttatcttctccctcccaccatggtgtctccccttctctcctcttacccctctctggggtatggtgactctgagggagggtaagaagcagggggtcccccaggtgggcatctcataatacatctccctccctcccacaccatccagcacgactaggggttaagtgacatgtgacatgaaatgtgctagccctcctagggccatttgcattgtaacagcagctgagaccttaggccaaatgaaaaatgagctgatggtgacttaggaaacaatagagagcaggttggaatggcaaagctcctttagtctgggtgtagaggaagagagggagaggagaaggatgaggtgatcgtcagtcagctcagaaatgctccttcccacatcctagatcaggccctgccaactctggcttgaaccgacgctcaagcctaaggcagcactcaccaatctttttctcaccatggcatacataaaaatgataacattcatatgtcatgtctggttatggaacacggaggtgcccacctgggagcccctgagtgctgaaacatcagtatcccagcagacctataactttgtggcgcagaactgcgggtgctctggccttgtgggctccttcgtcccagtctccttccccatctcttcagctctctgatgcccttcctaaagtgctgtttcattatgtcacaccctactcagttactctcaaccttcccctgtctcctagctgggcattcaagacccttctcattctggcctcaatctgtttctagtcccatttccttttgctcccatccgaggatgcggctccagccgggcaccacaccttgccccgcaaacatcgcgtttgttctagcctctcactctgtactcacactagtccttcttagcatgccttcccttcacctctgcctttactctcaccccttgtcccagacctaacccagtccccatcccttctgggaagcagctctgtctgcatcagcccttccctgcatatcagtagccttcacgctatgatccattcactcgacccttgaccctttagtccaaattaccttttcatgtgtgtgtggcttgtgtccccagccaggctgaggacagacatgtgaggcatggaagggcatgagctttggagcccagggactgccatgctcacttccctgggatgcatttcttcttctataaatacaaaaagtcttggccaggcatggtggctcacacctgtaatcccagcactttgggaggctgaggcgggtggattgcttgagttcaagaccagcctgagcaacatagtgaaatcctatctccacaaaaatactaaataaataaatataaaagatctaactcttggagtggttgtgaggttcaccttagtgcatataaagtaaccaatgtgtgccatgtacatagtaggcccagctcaagcaatgggctgcctttcctctccatggcactggttacacaacagatcctgggcaaaagacctatgggtctccttccaagccccagggtaaggtagtggttggcatcctgccctgcgcccatgatgggtactagaccctcagtgcagcccttgtcccctgcccaacaggccgcttcctggagctgcatatgtacatgacatctgcactgggcaagaatgacatgaaggccattggcctgcagatggcccttgacctcctggccaacaaggagaagaaagactccatcacggggctgcagacgcgcacccagcctgggcggcctgactggagcaaggtaatgccaactggagccctgcagcttgcaggtatggatgaagctgagagctcgaggcagcggtggggagacgaggcccaagctgtcaggggcaaagtgtgaggttaagtccagagtccagaagggacctcgtggtgtgaaaggtaaacagggcacctacactggctttatcactaacctttgttccatcattagcctcagtttctccatctgttcagagaggaagttagtctctatgacctcaaagacccctgcagccttgactccctatggaccagtgtcaaaaggcctgagtggacagggacctggaaaaacaacaaatcttatcatctcctgttacaaatggggaaactgaggcacagagacatgaaatcgtttgcaatccttttattttatttctcagattggttttattatttttctttcctgaacacttacttgtcagggtttgcggtttgcaggaagtggcccagaaggtgctgcttttaaaagtgctgcagatgaccccatgcctgggtcatgacagctgagtgggaggggaatgtctgtggtgagtgcttgggcatcaaagaggactttcagaaaaaggcaattcataagcagaatttggggtagaaaagggtcctcactgggggaaagactgacatcaggaaggatatttaaatcacagcagggtggccagccctggggactaacaccaggttcagactcccatgggagtcccagagcactgtatgcatctctctgcgtgtctgatttagtgcctgtctcccacagttgcagatccttgagtggagggcctgggtcttatttatttctggccctggtcctctacctggggttctgggtcatgttgccagctgaacaaatggctcttagttgaatggctgagtgttgaactctgctgtaaaacccagcagctgtgccatgcagctccctgtgtaaaatgggaatgctcattgctgccgacccgttatgctgttacctccaggtggttgtgtcactggtgagtcagcagctccacctatcttccctcttctcttcctcaaccccactgactccaggtgttccagaaagtggctgctgagaagaagggcaaggtgcaggtcttcttctgtggctccccagctctggccaaggtgctgaagggccattgtgagaagttcggcttcagatttttccaagagaatttctagcctcacctctccaagctctgccccaagtccacaccatgggtctgcttcattgcattagtataaatgcccccacagggaccagcctcagatgacccacccaataagacaaagcctagggaccccctaatcctgctcaacagagagaacaggagaccccaaggggcagatgaacttcctctagaacccaggggaagggacagtgccttgttcagtctgctgtagattctggggtttctgtgaaagtgagggaaccagaggctggtcacgggagcttgggggtggggttcgagggggcagagggcaaccactcctccaaacattttccgacggagccttcccccacatccatggtcccaaacctgcccaatcatcacagtcatttggaagcttatttctccggcatcttataaaattgttcaaacctacaaaaagtgagaagaatcatacagtgaacagtgttacctactttctagactcctcagttaataatttgctctgtttatcacatattatccatcagttcctcctccctctttccatctgtcaatttatctgattttttggatgcattttcaagttaggtgcaaatatctcagcacaccttgctacttggaggagccttcttcaaatgcacattccttggtcccactaccagaaattctgattctgatgatctgggaatgaaacctgaaatatgtattttccaccaaatccatttgcatagggagaaataagcagcatctttccctgcccctccttgtgtctttgtctccccatctccctctctcctggcgcgtccctcagagcctctctgggctctgtatgctggcctcttccttctctctgtgtgctgagtcgcttgagaaacaggatggagacagcctctttgtgtgcctctctctgtcgtggaaaggccaagtgcctggggatgaagcgggctaagcctggaagctcagctcagccacactctggctgtgtggccctggaagcttccccatgtctgttattttcatctgtgaaataagctgatgccatccgtcagtcacagttgctgtgaggtgacatgagacgccaagtgctcaagacattccacctcagttcagctccttgctgctccaggctttcgtgcatctacatcatttctctttatcctggctccctctgtctctgttttccagcctctgtttgcgtctgtccctgtctgggcaggagggaacagcagaggcagcaaaggctctctcagcacatactgtggggaggagcggccctgggcagaggacagggtgggcctcacctcctccatctgagctggacatttccatctgtgccacaccatgagctcctgtgagccccacatttcctgggcatcctccaccttgcagtcagtcctgataggttctcttcttgacagtgtaaagcacccttccccaaggctgccatcatggggttggaaccaggcactttccaatgggattgtagctggcacctttcttttccatgggttggaagtccatggttgcaaagggggaggtaaagaagccggatcataacctggatgatgatgtcccttatctaaggtggggctgggatgcagcagtaggggtgggtgtgacctgcaggggatgagccagttgggtggatggaagaatgaaggtgggggaaagctctcttctgaaaggggcaataggaaggggatggtggaggaagacgctgaggcaggccctgggaaggggaaggcaaaacataccctgaggactgggacagagcaggatgggagtgaggatgtcatctttaagatgtgaggaggaacgggaagaagaatacgagaggaggagtggggcctgcagtcaaggagaggctaattcggtttgggtgggtggaaagcggggctcgtgcttgcaccaagcctccatctccctggactgggagtcagcaaggccaggagacctggtgttggggccttccaaccagatcgtgtttaatttccagcaagcctggggaggcacacaactcaccagggaaactcacacctggagttttaccagcctgaggccacacactcttggaacctctttccctctgttgagtctgtactttcccctcttcatcaggcttgggaaggcttggacaaaacgctctctggggcacagaaggaaactaaagagggtgttctgacttaaggttggaggatgtaaacaggctgtgccaaatcatttggaaacgtggcagaatctgtttagcacaggatgtctcacacatgcactcaatgcacacacacacatgcatgtcaccgttttggattctttcccatctctgtctacaccgccttaacacatttgagccctgccctcagtcctttgccctctcgtaacagatttccaccaggctcccacccgcatatacaaatagtcagctgttcgtttaggacttaataatatagtgggtgggagcaggtggaaggacttggacatacgattctaaaatccgtgaatgcccacatgtgtgacgaccatatgcccgtgtcctgaggttttctctccagacagattccagttgcccacgagagggcgctgcagaatcacggatctcaagcgggtttgtttcccaggaagtgagactggtccgtgagtggcagttaatcaaagggaaaggggctgggaagacaacgccctgttccaaagctccccactagaggcaaaacctccaggctccatctctgtgaagtcaagagacttcatgttcaaggtcagtttctctagctggcagcttctcactgccgctgccttcccccagaaactctaccctccccatacccagtgtccagttctgggctttcctcttttctgcttgcaacaaaatgtccatcggtgaggtcaagttgaactgaacaggcctggcttggggagagttcacaggtccaggttctgtctgcctcggtggacatgtcatcgaaggcagcaggaccacacatgtgagtgtacagcacgcatggtctgaccatctggatgtttcccagatgtgcagatgggcatcatcggccatcaacaggaaaatgcatccggatgactggctgacttttcttctctcaccagatgttgccaatgctgtagaaacatctgggcccacgacagataaggctgacacatgcaaagagaagagagaaggagcaaggccagttatcggcacgtgtgcccatcctcccccatgaagctgcaaactccccaaggccagacatggggacccaaagcctagcacagagtgtagaccagatgtcggttcctcccagggcaaggggttacttaaatggaattatccttacaaagagtcttttgcacctaattgtcacttgtaatttggggaacaaaagcacaaacacaagcccactgaaccactttgccaggtgccattgcactgttctgtgaggacagcgctgacggagacagcaggcattcctgaaatgaccaatcaggcagggccctcctggacgagcggcacaagtgcaggctattaatacactgagctggggcattcgtgggaggggagggggcatgggcaacatggagagtcaccaggctggcagacaaggttgaaggtagggagggatgaggaacattagccgagactggctctgggccaacctgttggagacacagtggacaaacctttgccctctgggaggcagggcactgagtcctacacttgcctctgccacagtctgctgtgtgaccttgggtgtatcatttgacctctctgagttctcactttcttattataaagtgaacagatcaagtatgtatgcgtttaagcacttgtcatttctaaaaggatacatgaaagtatatttatctgtgtgctctggggagtgggaatggagggatacaatgaaggaaaggattttgtgtttttgtttttgttttactttttgcccttctgtaaagtttaagtttttattaatattatagttttattttaaaaagaaaccccaaataggatgtcatgtaaaagaaaagaaaaaacaagtaccaagtgtttgatataatcctatttataacacagaaaataaatgacatatgtatatcatgtggggataaatagataaaaatacacggaaagacagttagaagccagccttaatctgtcttgggcccagacagcccttatctgttgggggcccagatgtgtctacagcattgttaacatctggtgaaaggagaaaagtcagccagccatcctgatgcgttttcttgctgatggccgatgatgcccaaatgctaagcagttcgcagtggttaactgtggaggaggcaaaggaggacttgaatgttttcctcttatctgtttcctgtatttgtgtgttacctgagtaaggtttcacttcctgtattactcatgtgatattttactttttaatttatgtacttttgtatggcttgtatctattttttaagagtaaaacaaaatgcagagattatctgcagtgttgtctaagatcctgaatattgatttggtatcaagtgaaagtatttcgggcctaagccaggggactggccctccccgtcaggggtcactccgtgggctcttcaataagggaggctcctatagtgcccattatcaatatgctgctggccctgaatggcctaagtattaaaataaaatgccctgtctaggcccaaaactagtccagaaggactgtggaggccgtgggcatacacgtgaaattgtgtgcacaggggctaagcccagcaccagcccagcctgggagttgagatgcctcagggcacactgtctgtgctaaacaaatactcatattaaccagccttcctgacagattgatgcatctttttatgatctgtctttacaatatgatgactctctccttttaaaaataagattaattcagacaagacatttattttatgaggaaattcatcccagggggaaaaatactcaacctgaatggcagaaatggctggaaagagacttgactctcaaggaagcttccagcctccaaccttagccacccagccatggccccaaaagggctgccctaatactactcagggacaaatgggccctcttaaactaccctagctgtgtgagtgtagcctgctggagaaacaaagaaagacaggtagtgagttttagtgtggcagggaagaaaaggatgcattttttggtaaaggaaaaaaaaattctgagatttacccaaatttggctggacatgagtttataaatacagattaagcttgtctttaaataaccctaaagaatgttcaagaacagtgaatgatttgtctctgtgtccccagtgactagaatagcgtcaccacctagtaggtgcttggcgtgtttcatgaatgtttccactgctatggtctgtttcagctggtgaccccatgaggtacccttggctcctctatctcccccatcttcctccttcagccaatcatcaagcctgtcaacatggcattctaaatgcttctcaagcacatttccttccccactggccctgccttggttcagtccttaaattgcctattgcctgaattggtgcatcagagacaggctggagaaaggaagaccagttagccagaaaggaagcttggaagaccacccagctaactggtcttcctttctccagcctggctctgatccatcctccacacactgctgtgggtctgactgcacaccttctttttggaggactctcctattatagccatcaaactcctgagtctgctacacaaggcccccccaacataagccctagatgaagatctgctaccattacagccagtattacctggcccttgcctacctctcaggtcttggcaatgtccaccttgctttttttactttaaatagcatcatttcgtgctcccccaggacactgtgcagcttcgcacctccaagcctttgcttctgcatcgcctgacacttggagcacccttctccactttcagattgagacttcggaacactttatcatcagcctatctgtaaagacttccttgctggtccctcccatcgcagaataaacagcctgctccgtaggattgtactgtacgtacctacttgtacctacacatgtattggacggtattgtatttgcctacttacttgtctgtgaactccttgtgggctttgtctccccagtgcctagtgatcagaataagtgttggtgagctgctgtgactcctttgagcctccttctcattcctttccctattttctctgctgctcccctgcaagggtgagaacatcccaccatacccgcaggcagacaggaccagtggtacaggtgggtagagcagctggctgcctttcaaggtgcaccttcaggggccctagaaacatcccgcctccccccagctctagctctagatctctcacacatgctttcattccatagccagggatcaggttgaatttgcaaaccctagaaatccactggcagatgtgcactccaccttaaaatcacactaagatgggacaggctggtgacagagctgctcccagctcccccttggtaaaatgaggaggtgggggccgggtgtggtggcttacacctgtaatcccagcactttggaggccgagacaggcggatcacaaggtcaggagatcgagaccgctgtggctaacacagtgaaaccccgtctctactaaaaatacaaaaaaattagccaggcgtggtggctggcacctgtagtcccagctacttgggaggctgaggcaggagaatggtgtgaacctgggaggcggagcttgcagtgagcagagatagcgccactgcactccagcctgggggacagagggagactccctctcaaaaaaaaaaaaaaaaaaaaatgaggaggcggggctcatggtggctggttcctttgtgctacctcctccttctcttcctcattcttcttctaactcaaaagagatgaatgacttaaaaagcaaatgaatcagagatagggaaagcaaaaagagaggtaattttgctaagttattattcaaaggagctctctgggactgagagcaagagtggccccatcaatcacctagcagaatggggcaggcgggggacccagcagttggtgtctgtggatatctctgtgcgtgaacaaccaggccaggagcctggggcccttgccagatgccacagaggaaagaggccagagggacactgaatggggacagttagcccaaaggcctgagagggctttactgacctgctttactcaacagagccccctgaaagccccattctagggcgggccaagagtgggaggagggagatatgactgacaggggcgtggcaggagcctgttctccccaaggcgttgctaccctgagggaagaagccactgcctcatttgatcagatggggatccaagccatactcattcctgtattccaggccttggcctagtgaatgcattctcacctgtaaaatggggatgatcataagattggtactattaggtagagtaatggcaaggattaaatgagtgaatgtacatgaggtgcttaacgcagtgcctggcatgtagtatatttcagtcaatgttgtctgtcatcatcctcatcacaattacgttctatggaggcaggcaggcaaaaaccaagtaaacagatgaataaacaatgacattacggagagtaagtgctctcagaaaataaaacagggaagcggcagacagtaagtgcagacaggagcacgggtacctggagtcaatcccctggggcgcacatgccaggagttgtgtgatgacaggaagtcatgaaatgcttggtgttttagttcttcctttaccccgtaaagtgagggcagcaatgcccacctcaccatggagagtgtgtgtgggagggggcatagtgtgtgagaatgtatgtgagtgcacgtggtgtgagtatgtgcatttggggaggaggtagagaattggataaggtacaactgtaaactatcagcattggggcacaaaggttcaataaatgctgatcattgttcctgcctatgacaagcctcaatagatactaattcaatgataatgtgatttagaaatttcccagatgttaggactttctcagggaaaggttattcaacagggaggtcgctgtgggtcccccaccttgcatgcacccctccgcagctccactgccccctggaggtctctgcagcccctcatcttcacgtcctttgtgaccaagccacatttggaggcctaataaatgccttcccttcctgagaggaccatcaggctatggcactgcccctccctgcatccttctccaaacactgatgatcctgggctgcaagaggtgggtggagatccactcccagcccctccagctcattagcggtgcattatgaattccggggataatgtgtgtgatttcctctcctgattgctgctgaaatctcctgcctgtttatcaaatctgagccatgctctgcagccctctgctccttggctctgggctcttcttctccagaggaggaaaacaaggaaatgctcctaggggattccggctctagagaagaggatgatggtgacagtgagcaggaaataaggttggctttaggggcagagggcagaagggctccataaagcccctgacccccgacccagagccacactgaggctaaactcccagggagaaaagccctactaaatcaggtgagacctactctgtcaccattagagaaccactcattcattcattcaccccacaggcattggctgagtgtccgcctcgtgtcaggcactgtatcagttaacaaggataccaagatgaagcataggccctgccctagagtgagagggaaacacacaggcccatagtgccaatacaaggggcagatgccagcacagtcctcatgaggtgctggggcagcatgaaggagagaggaagcaaggtcagggtgggggcgagatgaccccaggcggtggtcttgaaggagaaatgagacttcaccagctggaaaacaggggagggggagggtatatctgtgcacacgagtccaggcgtgtgaaaagacccagaagtgtgagttgctgggtgggatcagcccatcctggggtggctggaggccaggtcaggaggcagcgagagaggagcacaggcgcagtgatggacctcgaggctgtgccaaggagtctgtctttaatctgaaagcaaggaagatccactaaaaggtgtaaagcaagggcatgtttggtcccatctaccttttagtgaatcttccttgcttttaataccttttagcgttaaaagcactaaaatcaggcgatgagaccagacacacccttgctttaacaccttttagtggatattccttgttttaacaccttttagtgggatggggatgggcctggacgtcatgggtcaacacctttaacagctgtgagcagggcatgttccctagaaggagcatgggcaggacaggcagggaaagtgcctatgacaatgactgctttgaactgcgtattcagttgccaccagatcccttttcactttctctgggcacgggttgtttcagatgtgtgcgtgtcatctcctgccagtctgaaagccccccgaggctggatccttccttccctcttcacatgtccttcttggaaaagaccgtaggaaacagcaagcactcaataaggactttttgcctcatcttggattgtttcaatgccattttacagttatttcactatttccttactgtttgcaatgatatatttgccatggaatgtttaccttctccagtgtctgcctcccctgcaaacacagagacaacccaactctgactacctgcccaatttccttctcccttgcaaactgaaccctgccttgttctgggcagccccaggtcataaacagtgaccaagttaaccatgaagattctgaggtagccacaggcctggttctccagtgacggtaaggagggatctgctggggattctggggaagcttttgctcttctgctgaaaggaacaagggaggctgatccacctctttctcctgcttcctgtcttgactgagattcctggacatcctgaggtctccaatgcccatgaggcagaagccccaggcattcaggacagtgacaaggccctgccctgatccgggctgccttcttgctctatgagggaaagaagtttgtttttctctctgctctttcccagctcctagaacagcgcctggtatgtggtggccactcaatcatcctttgtgggctgagggaaggtctacattgcttaggccactgttagctgggagttctgttacttacaattgaacatatgcctaactcagtaactgtgaaaaataataacagtatatgctaagtttataaatggagtaaactgggtagaatcataaactaaggtaccaccctaaaatttgaagaaagatgctgtcatgagccacctgttttcctgacccctcagtctttctctgcccagagctggaaccacttgccccttgccccctccaacttgcacttgcacccctcttcctcaagggactggcagaatggctcattttcctatgagtccacatttcatagtacaggtcatcaccttttggccttgccttgactcccagagctgaggattcaagtatgacccagatcttcccagactggagagcttcaaagccccaccaaagaccaggaagggagagaagcaaagaaaggaaaaccctgaagtcattcctgccatatggctacagccttgcatcatccctgatgtgagccattaacctgccaactaccaaccaattagctctggtctcggctgtgcttccctagcttatgtctctgcttctcatcagccacacagaggggcccttataacccccaccccttgggggctgtccttgggggaggcctaaaagggtcctctataaacagcttaaacacatctttctgagccccctccaatgggtgctgaagaggaagtttcccccaggagactccacaatcaggggcatttataaagggattatgctgccattcacaaattatgtttttaccaaacggaatgaagaaaatgaagatcatgaaataaccagctttcctgaggtccctgctgcaggcctagaacctgacttggcaagatcccctttgagacccattatttttatgtccagctgatatcaaacttgagtttctcagctcccactccacatgctcctattttattgctatgttgctgtcaatgccccccatttccaaccccagccattgtctgaactggcacctgccctttccttcaaaatccagctcaagactctctccctgtaggagtgttcctgaccctaactgaaccctaatgaccccatcactaaacagtctgtttacatcatacttccaaacacacacgtgtgtgtggattagtaaatgtctagaatctttatacttgcctttgtacaatcttcttgcccaaactaagttcctgagggaagttgcgggcagttcctctatatatctcctaatgagaatccatgatttggtacatagtgaaagctcaaaaatattgctgactttttcaataatctgttgctttttaatacaccaatgcaaaagtgaatggcttaagacaaccattctgtcatctctcatgagtccaaaggttgactgggatcagctgggtggttcttctgttgcacatgatagcagctggggctgcggtcatctggggactactgggctgaagtatccaggataagtcactcacttcgctggtgccttgagggggtggatggaggcctggctcagttgtgaagctgggacagttggacctcccttcctccctgtcttcctctatccatatattctcaaggtctctccttctccacttgttctatgtgatctctccagcacagagagaccacacttcttacatagtgacttgaggatccccaaagcacaaaagtataagatttgaggatttttaaaacttagaccacaaacagcttagtgtcacttccaacacactttattggttaaagcaagtcacaggccagctcagattcagtgtgggaggggatcacacaagggtgatgtgattcactaggggaggtctgatttgctagggaacatcttgggatactagctaccccttgactgaatgcccagtagcatttatggaggccagggtctggttgtcattagtgacgagattactataaaaaacctcagctgtctcttcctcagactattttcatcaagaataaaaagaacacacacacacacacacacacacacacacacacacacacacacacacacactcacactcacacatactcataccacctggaaaaccaccattccaacctgtaaaaaatataaaaaaatctctaagagggtgaaaatgtgcatattatgaaggaaagattaaacaccatcactattagctgtccattttaaaaagatgtcttaaatacattttttcatttgatcttgattcccatccccattttagagatgaagaaactgaggctcagagataataagtaatttacccaaaagggtggagctaggtctgaataaccccaagacttgtccctgatgccagaaagaattattagaatatgaattagtgtggtggctcatacctataatcccagaactttgggaggccaaggtgggaggatcacttgagcccaggagtttgagaccagcctgggaaacataccaagaccccatctctacaaaaaaaaattttttaaagaataggaattatgcctatcaatgatagactggataaagaaaatgtggcagatatgcaccatggaatactatgcagccattaaaaaggatgagttcatgtcctttgcagggacatggatgaagctggaaaccatctttctcagcaaattaacacaagaacagaaaaccaaacaccacatgttctcactcataagtgggagctgaacaatgagaacacatggacacagggaagggaacatcacacactggggcctgtcttggggttggggggctaggggagggatagcatcagttgaaatatctagtgtagatgatgggttgatgggtgcagcaaaccaccatggcacttgtatacctatgtaacaaacctgcacattctgcacatgtaccccagaacttaaagtttaattttttttaaaaaagtgcaacaaaaaaataagagttagtgtttttggtctaaagaaactgagatcctgaaaggtgaaatagtccagggtccctcagccaggatcctgattcccctttagaagagaacagatgcaaaaaaaagcacagggcctgattcgtagtagatgttcagtaaacacaagcccccatctcttctccaaatgagatttcttctacagctcactgtcattggtccaaagaatgcagccgctacactgtgttattggcaggattgtgggcatgactgatttcctttctgattgggtaggaaggctgaagggcgagtttggaagggctctgttcccttcatctcactcctttccccactcgcatttcacccaacagtcgtctgatttttgagcaatctgttcctggaaagcagaggaaagtaacagattgatgcatcgactgcgtgtggccaagtgatttatttttaatgtgactaaacaagacacacacctgcctatggaaacgtaatcacattgaatcatcagggacttagatagccatttaagcaagggaaagacagagaggagacagaggagaggaggaagaggagggagagaaagaaaagggaggcaggggagcagagacagaagaggagagataagaagggactggaagagagggaagggaagggaagggaagagaagactgggccagctccctaaaaatgtttatttcagcagcatcagtgaagcaccctcaattggcccaaatgcctgtggtttagctttgctgatgcctgaaatttcataattagactttcgtccctgtgatttaaccaaacacagtatgttctccactaaagtgtaaatgcaacagaagtagtgcatcaaactacatcaatcattttcacctcagtgagaaagaactgatatcttttatgaaagcaggagtttttctatgggggggttgtattagtccattttgcattgctataaaggaatacctgagactgggtagtttataaagaaaagaggtttatttggctcatggttctgcaggctggatagcatgacactggcatctgctcggcttctggtgaggcctcaggaagcttttactcatggcagaaggcaaagggggagtaggcaggtcacatggcaggagagggagcaagagagggaggaagaggtgccaggctcttttatacaatcagatctcactctaactaatagagcaaaaactcactcattaccacagggagggcaccaagccatttatgagggacccactcccgtgacctaacacttctcaccagcccccgcctccaacactgggatcacacttcaacatgagatttggaggggagaaatatccacactatatcgggggcattaaaacaaagtttatgggagtcaccagtgaaggcacagaaaggaaccttgggggctctagggactttctccttcatggcttttcttaatgataacacctacctttacgagcatttgttatgttccaggcactatggatgcgagccattacatgtactatttcattccatcttcccaatggccctggaattttgcgctggtgttctcatcactctccaggtgagggaactgaagcccagcctgtcgtcatctgtctcagcactctgaaaggaagatccagttacagcagagtttctcgtggaatgcccagcctcaccaatagtatcttgcttgcagaaggcactcagtaagtatgtgccaacagagtgaagtggcagggatgggacatgaatgtagacagtctaactccagagcctgtacccttagcatttgccacaactttctcccagatagtccactccgttctccctgcttctcacccgaatagcatacgaaattcatgaaccactgactttgggaggctaaatgtcctccatcacagctcccttctcaatctccctgggtcagtaccaggaattagccagccagactgttccactctgtactgctagttttctatgtccagataccttttcccagttagtctgtaatgcctttgagggaaggcacagcatccatgcagagtctatggggggatgtatgagtccttttgaaattgcagtttctttctcaaaagcaagattatatctttgtgttttctattaatatgattgtggtaggtttttttcttgaattttatatcaatatccttcaccctgcccctagcaatagcacgtgaaggagattatgaagtcataagttaggggggcatcagattgatagctttttgaagattgataatatctagtgtgggcaaggatggaggaaatggatactcatacattgttggggaggctttcgaggaggcaaatcatcagtaagtaacagtggctgaaacaagataaaagctttattttatttttttctcatacaaaagtctaagctagtagaaagtcctggaaagaaggctggctcggctccacaaggttatacaaggacacaggttctttctgtacattgtaccaccatccccaggggtgttacctgcatcacctgctggaagctgactcccactaccacatctgttctctgaatagatttctccctggggaaagcagaagtacaacaaacagcgtattttaaggacctgattcagaaattgcacacaatgcttctcatcagtcataacttagttacacgtccccatgtagtagcaaggggggtggaaaatatattctcaactcatacccacctgaaactcaggagattcattgctaaaaggaagaaaagagaaaatggatagtagggggacagtgaacagtttctaatacaaacaggaggaattatcaaagttaaaagtgcatatattgctagacccagcaattccagttctagaaatgtattctaaggaaatagtcacacaactacacaaagattatgtataagggtaatactagtggttttaaaatatgttcacaaattctttgatacccttcccttcacaaaagggctacacttaatgacttactcctaatgaatagaatgtggccaaagtgacaatgtgtgacttcggaggctaggtcataaaaggccctatgcttctactttgctctctcgaatgactggctatgatggaaacagccaccatgttgtgaggacactcaattagccttgtggagagacccacatgggtgagaaactaagggctgccaccaacagcccacatccacttgccagctctgagagcaaatagatcctgcaggcctagtcaagcctcatttgactgacgcctcagtcaacatcttgactgcaagcccatgcaaaacactgagccagaaaccacccacccaagaagctgtgaattcctgactggcaaaaaatgtgagtgattataaatatttattatacttttaagccactactttttggagtattgtgttaggcagcagtaaataactaatacaataatcattgcttcctgtttgtaatgacaaaaaagagaaagaaaataaaaaatttaaaaaaagaaacaccagaaatgtaaataatgggaggttaaataatccatgagaaatccacagtttggaatttgcagctattagaaagagagctatggcgtaaaagacctgtatgttctgtcattgacagctccttaagacatattagtacatgaaaatgacaatctgaagaacacttactgtatggtctccatgacataaaactgcaaaaaagttatgtgtgcatgtacatatgtgcatatatgcaataatgttatatttgtgtatatccgaatgtgtactttcacatacttgtaaatgcgtggaataggagtgaatgtcgcataccaaatggcaggcagtggttttaccagggtggaggaaagtggaatgggggtggcgagttgcaatatggtgttcacattttactttgtaatctcctgcattgtttcaacttcttacaatgaaaatgcatttgcatattccctgtgtgataaaacaaagaaaatcataaaaagagagagaggcaggcagatagcagagatggaaggaagaggagataaatagaaacagcattttacccactgagtcgtgactacaagcatcttattttacctgtttgtttttccttaacatcccaacatagaaaacacacactttgttttaaagtaacagcgaggaaccgcctcgctgtggtctttcgcttgcttggcattgcccctagggtgctcggagatgggctgtggagggggacgttgggaactgcccgaccccattctcgccttttcccgctggatgtgcagctttcggaacgtgcaggggcgggagtgtctacaacctaagaaaagggccgcggtggggagcccggagcagggctgggtgcagggagcgctctcgctgcccggggcgctctgcgctgcgcgcccagtggggacagcacgccgccccgggagtctccaggcgcgggaggtcccagcagattttgcataaagggaggaatcgagtccagagaacaaacaagatactggaggtggtggcacggagaggattgattcggtttgcaaccctacgaggtcgtggccgctcggggcaggaaagcaggctcctgtctctccaggatccagcctcccgatcaccgcgctagtcctcgccctgcctgggcttccccagagacgggagcttgggtgggggaccctggacccgaagccaaggctgaactggtgtgccaagcccagggagcaaccaagtccccaactctttccctgcccttcccgcaggctgagcagaaaaccaggaaatggatggactccacctccgcagccacgcctgcccgtttgcgcttactgaacagaggtcctcaggaacgtggtgagacaaagagaaaggagggcgttttcgccaccctcttgctaatgcttcaataactccccattgccctaatgagctcaccatcagagcctgattaagacctttggaggccctaaaattataagacccactatctccatcaatgtaattaaaaaaaaaacaactttaaatggaactttaccaaaaagccgattttcctctgtgaaattattttaatagcaacgacaagcccttgccttgcagcacactggcctgcccaacagaagatccagtaaggtttgcaaaaccagttgggatctcctcaccttgcctctctcctcttcctgcaccggccggctaacctgtttccagttcctccgaggctcagtccttccctgagtttcccattgccctccagagccagcatatatttccacttccctagctttcagtccaggctgtgttagatgccttcagtgctttctccatcacaggacttagcacacagagtaggagaatattcccgtttcttccctgtcaccctctctgtgctgagggctcagaaggcagagacaccttttctgttttgcttacaggtatggtcccagaacctagcatgtggactgacacaccctttgctcaaaaaaatacatcaatatttgaaattaaccatttatccatagcaaaacacatagcacagaataaaaatgcatagtccattctggcctatgcagtttcagcttctcagcatttattgagcacctccaaatgtgctagacaggtaatactcaatacacattagttccctccatgctaaaatagactttgcgtccacgtaactttgctggaaacttgagggaaaccaattatcctgccctttccctgggtgtctgatcggcatgtccgttatagccatagaaatatcactaacaggcaatgccagcaggattagatctgccaagtgtttaaagtttagcaagaaagctttttgcaaatgtcaacactaccactctgtttcctgcaaaccagcattctaatcagcagggctgccttttccagctcattgagcaatgacataaaaaaatcccagcataatcatttctctaggagaaaaataccgaaagtcagagaggatgcaataacaatcatagctacctactatgtgcaggtgtcatgcttactgctttagttatgcttcctccaatcctcacaacaaaactgacaaatggggaaactgaggcttacagaagtcacacatctccaactaaggcctgaacttgagttttttccatagcactctactacctctgggggggaaaaaaaaactactattgtgcccagttaggatacaatgtattagagtggtagggacttcaggggctggttgtaggaaaagagaatgacaatgcttctcacgccagggttttctggggttttcatcttcttgttttcctctccttctcccctcagaggccaggtgtagtgacataatgattttggaaatttttgagctgaaaaaggaaaacattttcttcttttcttaaaaggggaactgttggagtgtttgcattttgggttcctggcatagcagctggtaggcttgatgggatttcaaaatgaagttactaatggaaattatacactgaggacattccaaagaaactgctaagagagaatggcttgtgctaggtgagtggaagtgttgcatcaggttatcacagctgggtattgaggccaggcccagctgaaatgttacagcaggggtcacctctcagacttggctctgtacaggaaacacatccaaggaggagctacatccaaggcaaaggtataaagccagacgcagaagacacagtacctgggttagctgcccatctgtccctgggtgtaggctaaagacatttaatcttggacacaggcaagcagctgcatacaagatcctgattcctgattcctgagcaggagtgggcagcaagttgttaattctgacctccaaccatccctgaggcagtgtagccctccattctcaaccctggctgcccactagcatcatctggtgagctttgaaatacagatgcaggactcatcccagatgggtgaaatcagaagtgatgggaaagggatccagtgtcacatatcttcacagctctccatgtgattctagcttgcagccaaagttcaaaagttctgacacagcctaggtgatcacaagaattactggagcactccctagaatagttttgccccagcctctctgctgtagatcttaattcagtggagctggcaggggcccaagaatctgtattttgaacaagctccctggcagttgttatgatcagataagcctggggacccacaagtgtaataaaatggtatattcacatatcatcattgcagtcacagcttctgaaatattatgtttttaatttgtatgtacatcattgtatctcaaccatcattcgattgtaagctccaagagggaaaggaccttgtctcattcactgggatgttctcagtatggaaaagaatgcaagcaagtggtggggattctgcagatatttgttgaataaataaatgaatttctgttttgtatttgtcacttccgctttgtgaaccaagttaagagtgagattgagggccgggcgcagtggctcaagcctgtaatcccagcactttgggaggccgaggcgggtggatcatgaggtcaggagatcgagaccatcctggctaacacggtgaaaccctgtctctactaaaaaatacaaaaaattagccgggcgcggtggcgggcgcctgtagtcccagctattcgggaggctgaggcaggagaatggcgtgaaccagggaggcggagcttgcagtgagccgagattgcgccactgcactccagcctgggggacagagtgagactctgtctcaaaaaaaaaaaaaaaaagagtgagattgaaactttgaaagaaaatacaaatgtatacaataattttatttcacttttatagatctaaagtcctgcttttaaaaacacaaagatttcttctatatggaacttgattgccttcattcagtcattgagagtcttcaggagatctgaagacccagagcaaaccagaaatgttgacggggaaaaatgtgcagaaatgtctgagagtaaaccccctgtccttaaacaaatttttcttctgaaattttctgcttcattgtaagttttatgtcaccagttaagtagggcctaggcagaaaaagatacaaagtattttcagaaaagttgatgaaactgcatccatttattcatgcacattcagaaaatgtttatcgtggaactaccatttttccagtaagtgccagtgggagcccaatgaaaaataacacacagtcctgccctcaacgactagctttcccagcaagtggaaagctagctatggaactaggcagttacagtacagtgtgataacaccggtcatcaaacccaagatgccttctgttgtaagatgcatcattggccaggcgcagtggctcacgcctgtaatcccaaaactttgggaggccaaggcgggtggatcacgaggtcaggagatcgagaccatcctggctaacacagtgaaaccccgtctgtactaaaaatacaaaaaattagccgggcgtggtggcgggcacctgtagtcctggttactctggaggctgaggcaggagaatggcgtgaacccaggaggcagaggttgcagtgagctgagatcgcgccactgcactccagcctgggcaacagagcgagactctgtctcaaaaaaaaaaaaaaaaaagatgcatcattaatttatgcaccactaagaaaaatgctgccaattgaaccgtgacgtgttgtggattttatcaagatctgttctaatttcagagatgtgaaaatgtaacggggtggtagggaggtgaggaatgtgcattttattttatttatttattttgagagacagggtctgtctttgtcactcacacaggctggagtgtagtggtgcaatctcagctcactgcggcctcaacctcgtgggctcaagtgatcctcccacctcctgagtagatgggactataggcatgagccaccatgcccggatttttttttttaacttttttttttgttgttgttgagacaaggtctcattctgttgctgcccaggctggagtgcagtggctcgatctcagctcactgcaacctttgcctgccaggctcaggcaatcctcttatctcaacctccctagtagctgggactacaggtacatgccaccacgcccagctaatttttttttttttttttttggtagagacagggtttcgccatgttgcccgggctggcctcaaactcctgagctcaagcgatccacctgcctcagcctcccaaagtgctaggattacagacataagccactgcactcaaccataattttttttaaactttttgtaaagacgatgtctcactatgttgcccaggctagtctcgaactcttgggctcatgcagtcctcccactctgacctaccaaaatgctgcaattacaggcatgagctactgcgcctggccagaacatgcattttagaactgattaaataagtaaggtaaatcagacacgaaggatatacagaataagccaaagagtagggtgtagggtgtagggagacttggaagaaggaaagtactgtgaagaggggacagcttgtgctgagaggtctggagggaagagggtggctgcttatagctcagtaagactgcagttagagcctgtgggctggaaggtgacagatgaggctggagatggaaacaagggccagatcatggcctgcctcataagtagatggccttagtcccagtttacatctgtagtgcatctttttgatcttaagtgccctgttggacaataaattatatgatcaccctactaataagccatttttagatatgtgctttttatcttaagagaaatgagaacaatggaagggttttaaacagacagtaacaaaatcagattgtgaaagtgtgtgtgtgttggaggcagggtgtgtattgcttaatttgaatgtttttgatgagctaatatgttcatacaagtcaaaactttaaaaaacacaaaagtgaaaaatctcccttccaccctggccctccttccaccccttccaccctacctcacggccaacccaattttcttccctaaaagcaactgatactatcaatttcttgtgtgccctttcagaattttgttttccttttctttgagatggagtctcactctgtttcctaagctggagtacagtggcgcgatttcggctcactgcaacctccacctcccagattcaagtcattttcctgcctcagcctccccgtagctgggactacaggtgtgtgtcagcgcgccagctaatttttgtatttttaatagagacggggtttcaccatgttggccaggctggtcttgaactcctgacttctagcgatccgcctgcctcggcctcccaaagtgctgggaatacaggcgtgagccaccatgcccggcccctttcagacatatttaatgcatataaaattaattcttctttgcctttcaaatgtacctattgttttctaattctttattttcatttagtttgcctccttttcttattcctctcactatctctcattgagtttccacagtatgtgttccccttttactgcttcagatttgaggcttcattttttaagagtgaaggttggatagttttctttttttctttcacttcttccccaagctctggcagctcaggattcatttcctcccactgtttcattacctcttccctcatctctcatgtgcgtgttttctttgtgggggaaattactttgctatgttttcttaattttctcgttaaaattgtcatctgctccatgacaatgttttttgatgaatcttctttacctgctgtttgctgtttgctttttcttttttcctcctttgtttcttgtcaaaactttgtatatattactcattattgaagaaggtaatgttttttcttccccgtggacctcaggtgtgagagaggccaagattgtcttccaggttggctaaattttccttatgacccagggttgatgtaaattcactgagccttgaattctttccaaccaatggcaaagattccccgaggcaaagtctctcctcccctgttgccacagaaacagaccatttcctacaactatggcttgtctgagtcctgagccagcagagctcaggccacagcacctgcacccgttttctgctgctgcacacaagggctctgtgcattccgcatccaggtgtgcccctcctcttctggaggattctttttcaggctgtcccagagactttgcagcacagcatccttgctctatttcttcctgcaacatctctgctgaagctctattgcttttggcaactcttccgtctattttgtggtttaggtgtctcctacttttactaaaaatggaatttgtgtttttatcgctcaagtcctttttgcttttggattacttccagaaaatgaagggagggttactaactttatgccatcttcaaaccagaagatcttagattagtaagatcatgttggccatggcatggagaatgggctggaggtggagagactggaggttggaagtccagttaggagattgctcctgcgctggggagttggtgttaggacagaagatccaagacgcgtttcagaggtaactgctgaatcttactggctggttagatgtgtgtttgggagtgggggtggatcaggaagaaacgggatatttcagggctggctgctggaggctgcttgcgatgtaacgtggagctgggcttcctgcctgttctgcagcttcctgccacattccaggctgcatctgtgtggctgggccctctgggaaggtcatagggagtcctaatgggacaatgagcttcccagccgttcccttgaaggtcccttgcagatatctggatgaaactcttggctggtggaaactttcaagaaggcctgaggcagtcagaagccaagttgtggtttcaaaattaccggcctattctccaagtctccctgatgatgagatctcaagataaaaacaagaaaactgggcgcaaaatgctctgtggaactgttgatatcccagggtttcctgccaagtcctggctaaggaacacagggagggaaaggggacctaacagaggtcatagaacccactctctgcctccatagaggctttccaggtcatccaaactacgaaaattgaacagagagctttctctctcagattctccagaggggggagactcagattcttttctttaatcagtctgtaataagtcctgagtactggctttttcccccccttaatgtacaaccagggttgagaactgagggctacacaatctcagagatgatcagaattcaaagttaggaatgtgctggctccacgtctgtccactcttgtgcagtaacacagctgcctgcctgtgtccaggatgaaatgtcttcagttctgttccctgggatagactgacagctgtggaaacaatgacccagatactgtgtctcctcctaggatatgtttcttgactccgcttatgtggttactgccaaacctggcctcagtgccttctacacacagttttgaaaaccagggcaatatttccaatcatctaacagaagctgctccttatcagtgatgtctttggaaagttaccagcaattactaagctagctattgggaaatcttaaggatttattttagcaagaataatatgaggtcttctggtctgtaaggacctctgttcctaaaatcacagaaccacggctgtgctctacaatgtaatagtatgaattcatttgcaagcgtgctcagataagatagagtctttagggagttttaaaaaaacttggggggcagtgcttatgatattgtgaaaaacaaacacaaaaactgtaatttcgtgtacgttaaaaatatgtgatcaagtgaaaagagacttcttaccctgccttccccaggattccacacccaccactatttcctttctgagtgattacaagagtcggtaacttgagtacaatatgctgttttgtcaagttaataaaggatatcttgtcatctgaccttggacagagaggatgtaaatgttctcttgggctaataaggtcagagtgtttgctcacaggaaatagagttatgagtagagtaataggaggaatatcaatttcttatgtgggccaaatattatttctgtagttgtattttctttcctggaaaagattagtttttagaggatgagatatgttttattttagacgagtgcttcattgagtgaagcagctacagtttaagcagaagtcctcctttccccacctcctgccttgcacctcagggagccccttctccccacacctttcttctcagagatctcacctcttctctcctgaagcagtagctactgaggagaaagaggtgaaaagctagagaggcaacaggaagaggggagatggggaagagatccatgcaggagaccttgtgtgggtccgtgggacttcatgagatacctgcctccaccctcccatttcccccaataggactccaattctgtgaggcctgaagacagtctccttttctttttctctttctttcctttcctttcttttctttcttcttcttcttgttctttttttttttttgacggagtctcactttgttgcccaggctagagtgcagtggcacaatctcgactcactgcaacctccgcctcctgggttcaagcgattctcctgcctcagactctcaagtagctgggattacaggcacccaccaccacacccagctaatttttgtatttttagtagaaacagggtttcaccatattgaccaggctggtctcaaactcctggcctcaagtgatctgcccaccttggcctcccaaagtgctgagattacaggtatgagctaccacacctggcccactctcttgttttcattcaatgacaaagtgaaacctcccttaaggtctgagttactgcagaggaaggctttccggctgcctccttggttggggtgagccaaagcagctccgtcattggcagccactgggtatgggaagcagccatccattaagggacaagctacctggaggtagggaggctgatctcctaacgcaccctccctagaaaactgcagaaagaagcctactgcaggagttgcaaatatatatgcatagaataaagactaggagaaaaatagtctaaaatattaagcatgcttccctctgggtagctgaattgtggatatcatattttcttgcttctttaaattgtcaaactttcagtaataggaagtatgagctatttttataatcaggaggggaaaaggttccctggccaactcagggaggacataaggctggaggtttcggagtaagaggccagaggcagattcacaggggtgaggacacagtggcagtgaacatctcagactggacgggaccttgagaggtcatctagcccatcctcctgccttccggatgtatctgaataagaccaatatctgaaccctctccccccaccatgtcagaactgctccttgccttccttgcccttccactcccagcagaatgccaaaagaggtttgacttcgtgctaattattcttacttctttcctgctttcagtgttctgctaaatagaaaatagggcactaatggctggatggaaaatagggcatgatcttcccacaaagtctttgctcaaccacctgcctatagccagtgtcctcttggaaagcccagtcatccaaggaaagagaagtcaagctgagtcccagggagggggagaccttggggaagaggacctcagggaagaggaagaacaggagagcatttctacaggaatgtgcaaggagagctggggcctgcagagaagcactgactccttgtcttcttttttccttccttccttccttccttccttctttccccttccttccttctttcccgttccttccttccctccctccttccttccttcctttctccttccttccttccttccttccttctttccttccttccttccttccttccttccttcctctttccctctctaatcacatatgaagtgctgtgccaggcagattgtgtaagataaaacaacaacaaagcttgagatgtggtctctggcttccaggagcctatagcctggtgaggaggtaccacccagctgcgagagttaattttctggcacaggtacttgattttcataaattgccctcatgccagatatatgtgttgggggcagggagaggataagaaacaaaccttgtgatgtgataaccttgaagagcagggatgtcactttttaggaggcttaaatcacaccaagtgtagaaggttccagactttcagaggtgaggggacagctacaatttgcagcaatactaccaacccttcccccaacatacccttctccccttcttccctgaaaaatgatccccaaatatgtccatgtcctaatccctggaatttatgaatatgataacttacatgccaaaagtgtctttgctattgtgattaaattaaaggtgttgagatggggaggttgccctggattatctgggtgggcccagtgtaatcacaagggtccttataagagggagctaggaggctcagagaagacatgagggtgtaaacagaggtcacacagggaagaaaaggccactttgctgctgcttttgaagacggaggaggtgaccacaaaccaaggtggtctgtataagctggaaaaggctccccagagccaccaggggaatgcagccctgcccacccactttagagctctgacctcctgaactgtaagacaataaatgagttgtttaaagccactaagtttgtggtaatttgtcacagtagcagtaggtagctcatacagtcttctcttctcctctctgtgatccttgtgtggctaaaaaggagaaatgctaatatttattagaagttacagcagtgaaaaacagagaaaacgtatttctaacatataaacttgaccacaaacttattaatttacaaaaagtttgataagaaaacaaccaaatgccaaatttttaaatgagcaaagaatatgaacacgtagagttcaggaaaagaacagtggattgctttgtgctaaaatgggaagcttctctcacacatgttagagtgaaaggagtgagctgcagaatacccagggggtactctctccattcatgtcaaaaacaaaatagagtcatatctataggattttacacgctcgtttttgctggaaagaatcacaagaaaatattagcaaagattgcctttgggagaggaatagaggggaatggtatttaatttttaaaactttcctgatgtttgaattttttaaccttatacttgggtttgttaatgtcaacaaaagctatctgaccagggagattttgactcatttttttttgtgtttttcttggtgcctctttgtctttaaaaaaaaaaaaaatccaattagcattatataaggtgggtcacacagggagaaatcttccagagtctaccatggcatatactatatgcactaaaattcttgcaaacaggaagactgggctgtcctgtgaggttactattcaagctttaacggggggccagtgtcaaaagaagtatgacaaatccccagccctctatagtcctggtttctctcaggatggttaccaaggccctcggagctaaagatgattgtgtcaccagcctggtacctctagggctttggggagaacagatctgcatcaggaggggaaaaggggtttgtcactcactaaccattcaacgttgggtaagtagggacttttctaggcttttgtctgcatctggcaaaatgggagtggtgagggtgtttgttctcagggttactatgaggcttaaataagatcatgctgtgggatgcccagcatggccacgggcccaagccagaacatgacaaaaccaagtcttctcctcctttcttatgtttatttctaagcctgtcgaggactgaaggaggcccttgttcagcagaagagaggtaagagcaagtctttgtctataaaaacccagaagcctgatacagaagagcaaaaacacacagccacaggtctattcccacatatgtgtgtttgccaccggtttgccctctctaccgagtcacagaagaatattaaagtttgtgagccctttaaagccaaacaggcacatttttccttctccccgacggacattttaatgtcactgcagtagctgaagtcttaggtgtcgttaacccacgtgcctacctcccatgaccagggtgggggaagaacaagcacgctttgttcccgaagcaccggttgcgacgtgctggttttctgagagcagttggacttttagttgctccaggtggtaactggggtcaaatgcactgagcttaagggaaaagctgaacatttggaatcccaaaatgtggagattcaaaggctctttaagaatcctttcctctgatggacagtgcctgtcaggagctgtcctgcacccctggccggagctgggcagccctctgcccgatgagctttgaatgaggaaggaccagtctctgccaggccagcgccagttgtctgaggaagctcctgcttccctaggcctttggagatactgactttttcccaagaagaatcttcttgccctttcccctctcattcacaggttgatttgttcatctgcacatttctgtgggagtctttaagcaccaggcgctgtcctgagctcttgtcagtgtggcagtgatgaggatatcgaccctgccctcagggccaggccactctggtggccaggggagcagttaagaggctccgcagcacaggggagggggctttggctaaaatagaaagcatcagtcaagcagaacttcacggagcacctaacagaggctgggggaaggaagagaaagaagtagatggattccagggatttatggcctggggcttgattaaatttgagggagtgagagaggaagggatcaagggtgatcagatttccagctcaggggcaacagtgacaatatagaaggggaaggaattttggagcagggtcattgggaggagtgagaatgaatcaggctttagacatgttgggtgtcaggcccctgtgggaggtcagaatggaaagtcctgcaggcagtggatatatggtttcatggtacaagagaaatatcggaactggagacatgagttcaggagtcagcaatgcatgagtggtcaaggagggcagaagagggtgagatgatggctcaggagggagaccaggacagcactgtgaaggccctatcctcaaaggatggggacagaggagcctccaaatctagaggacgaatcctagagagtaaggagaatgcacacacagtgtggcatcggattcacccttatccagatcccatgttctcagggcaatttcctctgggaaagcagccttcctcccttgccttccgtgtggatgaggatggtggatccttagccagttgtggatcccagccccacgcccccttcattggttttgggatggctgtatgacccctcagagccaatgtgcagcgaggaggcatggatgtgagtgaggggaggaaaggcaggctattgtgggaaggagagactccccctcaggtgggagagagtaaggtagagatgtgaagtcaggcaccaacacagccatttacaattgtgagggaaagcttggagttactgggggtccgctaagtgaagcctgcaggtgaggccggtattgtagacggcaggacggagagaaatcaggtcgtagataacattgtttgagccacaagatcaagcttcacctgagccaaacctccctctgggcttttcagttatgcaagtcaataacttccctttcccgtttaaacggtctcagctgaggttttgtttgttttgctactcgcaatacagagtcctaataaatgcacaacctgaagaagagacctcctggggtcagtgggcagaatggggtgggaggggaggtgtcaggatttaagaaactttgacacatctgtgtccctgaatcactgtcacctgcagagccacaacaggttttcgattttgcaatctctttacagtgtttttcttctcctgcggtatcacttctctggcaatacaattaacatgattccaaagttgcttactcactaaaaatgagatgtagttggaaaataggttatcctccccttctccttatgttgcctgcccagatgctgaagggctgtctttatacaccagggtcaatggtatgtaatggtgtgtctctccctattcagatccatcttccataccatggccaagtgggctctctaaaatgcacatctctgcttaaaaaacactcatacttacaaaactgagccaggcatagtggtgcacacctgtagtcccagctacttgggaggctgaggtgggaggatcacctgagctcaggaaatggaggctgcagtaagctgtgattgagccactgtactccagcccaggcaacagagtgagaccctgtctccaaaaactaaaaaaaaaataaaaattaaaaaaaaaccacttatacttcccatggcctgcaggaagagatcacagaccccttaggatggcatatataatcacacacatgttctagatcctgggtggccttcctgcatcagcaaccctcctatgatcctcagacagcactgctgtgtgaactccagctgtgcgattgtgccatgcccccccaggtctctgggcctgcgttcctatctcccctctgcttggaaaggtaattcacaacaatagctcacactgacggggcacatcctgtgtttcaggtgctccactggaggctgcaggtggattatcttgtttaatcctcacaacttcctaatgaggtagcgctggtattaacccctccaccctgccacagtgtcactcggctaaacaactcagatttgggggaatatgctagagaagcacataggagttctgggttgaggtctcccaccggagttagggaatgaaggatcaaatgaaaaaggtcagaggaaatatgatagtctagaggccaggaaggggtttgaagatgaagggaggaaaactaggtgatgaactggggctgcgttgcaagactgggcagctccatcttggttgacattggggctcctccccacgcaagcaagggtctgagggcttaaggaacccacatagctcaggctaggtcctctggactgcgagctgccctggacaccatagataatggctgttgtccaggatttcctagtccctgaagactggaggctctgccatgtccctgccaggcttacctgagagtgtgtgtgtgtttgtgtgtgtgtgtgtgtgtgtgtgtgtttataggggggattatttgcacctttgttgaggttgggaaccttgtgtgccaagtaggcgtgaccaccctagggtcctcactgcccacttccctctaaggtctccccaccgccgcccatccctattgcctgtctgcccctttttctggtgaggagaagctccccaaatcccttcttcagctacttccctctcacctgctccaagccctccctctctcagacaattcagcataattcccctgaaaacgtgtttttacaaaacaaaagccaggaaggggaggaggtgtgttctggggtgcttggcaacagcagcctgtgcagccagcggcttggctggatgatgtggctcacccagcaacacaaaatcctctgagaacagaactcacagaggctgggctctctcccacactggggaggggagtgtctgcagctggaagagcaaactgcatgcaattgcctccaggtttccccatcccatgtgtaatgacatcttcatttgattaatgactgtcttctgcattcaccactgagtgtaaactgtataaagacagggttttgtgtctgttctggtcactgtggccttagtacagagtccagcacacagtaggtgctcaagaaatgtttgtggaggagggagcgagggagggaagaaaggaaggaaggaagaagggaagggaagggaaaggaagggaagggagagaaggggaggggaagtgaggggaagggaaggagagagggagggagggaggggaggaagggaagtgaaacagtttgaaggaggtgatgggcaggataagaggagcatctgtaatttcacctttctccgcctccttttctcagagcccctcttcttgggcctgcgattcctcacctggaagggagaagagtggacttcctgcctagagaacaccttggtaaactctttgtggttcctgtcatgagaaggtgtgcagcttagggaaaaagcctgtgagctctggaatcagatggaactggatatgaatttccatttagtgcttgttggattaaatgtgatgctagtaagtacacttgcctagttgctgctcaagaaatggagctattattatttacatcataatttgaacttcattcattcaacccataccgatgagcagccacaggccctccttccacagggcttaccttcagaaagttccacgtgtcccttactttctggtaggcacattcatgggcacgtaccatgctaaggaccagggacctggagatgaagacagtcctgtccactgaggggttcacatctttccataaaacgttctgacccccctgtttctttcttctcatctcctcctccaatcccccctgggctggggcacctcctctgcactgtccctctggaagcagagaggagtttccaacctcctccagtcccctgccaggtatcctgagcctgagagctcctcagagcattgtctgcagttacctcctcacttacagcccagactgagatactcacacttgtgattgcccaggtggaggggagaggtcaaactcttcccatggcctcctttctcctctgtgaaaactccagatctttgctcctgatttttttttagtgtgtacccttttgtatttcagcttctcccagccgaaagaataaaactggtaagaggaagggaaatgcagcctcagtaaggaggcctccattctggaagggcttcccaggcccagagaagggagaaagtaatttggaaccacccaagtattggtgatgccaggcctcaccctaccctggggatatttgaatctcaaaaagggagcatgggaatctgacaaagcacttgcatgtataaagaactcctccaaatcaacaaggcaaaaacctcattagatacataggcaaaaacctcagaagagccacatcacaaaggagcacctccaaatggccaagaagcatatgaaaatatgttcaatctcattagccaacagggaattcaaattagaactacaccaggatggctgaaagtgcaaagactgacaatatcaagggctggtggggatgcagaacaactggaactctcctatgcactgcggaaggggtaaattaataccgcccctttggaagaacagtttagaagcatcactaaagctgaatatattcatgcctactccggaaatcctgagcccaggtatatatctaacagaagtttgtttataaaggcaccaaaagtcaattacacaagatacaagaatgttcatagtagagccgtttgtattagtcataaactggaaaccacccaaatgcccatcagtggtgagtagataaataaagtgggggtaatttagacaatgaaaatgtgtatagcaatgagaatgaatagagcactgtcacctgcaacaacatgaacaaatctcacgaaggtgatgttgagtgaaagaagccagatacgtaagacagcacgctctgacgccattaatttcaagtttgaaaacatgtaagccttaagtctgtggtgttaagaagtcaggacaggggttgcctttgagaaggagtggggcaaaaagggactctgggagtgctggtaaaattctgtttcctgatctggtgacagttataggctatgttcactttgcagagatttatgttgtacataattggttaagttttgcatctttctgtatgcatgttatacttcaacaaaaaagaagtttacttgaaaaggaggcaagtagagctgggcattgtggctcacacctgtaatcctaacactttgggaggctgaggcaggaggatcacttgagcccaggagtttgagactagtctgggcaacataaaaatatttttttaaagaaaattacctgtgtacagtagtgtgcacctctagtcccagctagtcagaggctgaggtgagaggatcgctggagcccaggtagagggtgcagtgagctgtgatcgcactgctgcctccagcctgggcgacagatggagaccctgtctttaaaagaaattaaattaaaaataaaaagaggacagtagggggaaagcagtatggaaagacaatgctcagcccaaaggggtgagtaggggactctgcgactgtgtttactggaatttagagacagtctctgggagggaatggaagggaaggaagcaggtggggcagagggagaggtggggtttcagtgcaggccagccacagcctctccaatccctcaatcccttgtaggagtcctgcagctagatgagttcctcagagtcatcatgacttgggctgtgatggccacacctttataccccagcattggtcagtcactgaatgtgcactgcccaggaagaggagggatctcaggcctggctgcgctctgcagctgaggccgtctgaaaggggctggcctgactatagctctcccagcatgtccctccttgaagtggatctgggcgaccaccacaggaagcctgccacctgagtttagaagatttggtggcctgtaaagattttttttcagatccctcagtcccagcattcctagtctggttaaactcgtccagcggtgcccagcactcataggacctgctttgcatcatagcctgcagacaggcttcccacacaggatccaatgcctggacacaccagaggtctttgcagtttgcctctcacacctcagccaaagcctctccttggcctggactcatttggtgaaatccagctatcctgtaagacttgagagtcacctcctccaggaagctctcccagatcttgccccttctaccaggaaggctgggcccttgctcttctgagtcccctccaagcaccctagcaccctgccttttataaaactctcatcacactctttgtttacctgctggtagaagtagactgagatcaagagatgccttgtcactcctgatcactgacactgcacaacagtgacaacaattctgatggctgccatgtactgagcttttccagccaggctggcatttgctgtgcacatccatgcctgaatttactaaatcccaacaaccaaccaaccctgtgaggtcagagtagctaccttataaagcaggcatgattgcccacaatcacacagccactaactatcagagttagcacacacgtgggagtcagtttgaagtcctggtatcctctggaaatggtggtcggggaaggaggggagaaaagggaagggaggggtggggaaggaaagagagggaaaaaggaaggaagaaggagcgagagaagaagagagaaaggaagggagggagggagggaaagaaggaaggaaagaaggaagaaaggaaggaaggaaagaaggaaggaaaggaggtagggctttccatccatggccctgaggactatcagagtcctcaggcccattggaagctgtttcacatttgaagagggactcatgaaactatggcaagctgctgagtgggagagggcagtcccccagcccctccctgagccccgcccatctctgtgtttccagaacctcttgctctccctgggatcctggcctggggaaatgcagtcctcaaatcaaagcctgcctgtgggagcaggttcatgggccagatctagagcaggggcaggcttagttcacagttttaatcctgatgtttactttctttctttccattcctagtggctccctttgaagaactgccttggggttcatgttgcagcatcaaacagggatggaagatgcatcttgctttagcagcaggagcctggaaagcagctgaagccctggagggtgcctggcacacagaatcttgtgctgagcccggagcacaatgggagcgggctggcggggtgggttcacagctggactgggagcagcagacatacaggccgtaggcacagacatataaagacagtcatgcagattgcaggatgcctgagagcacagactctcacatgcacaaatacgtgcatgatcgccagtgtgcatccagacagccccacatgcatgcacacgcatgcacacatgtgatgtgtacatagatggacacatgtctatgcccacaaacactgcagagacacagaagtgtctggcaaggaacactattttgtcctcaattttctgccagtgagagtctactgactccatctctgaaatgtctctacttattgtccctcttctccacctgcaccacatccctagtccctgaaactcccaccgagacccctgggcaatagcaaagtctgcacaggattcctgctccgcctctaccccacccttaagcccatcctacatgcaagagcaggagttatctgggtatcaagcaaatctgaccacatcacctccccactgcttaaaaccctttcctacaggatgaagttgaaatcacttgacatcccatataaggcccttgactgtctggcatcagccatagtctggcctcaggccctggcatggagtcccctggactcagtgctctggctgagggcctccaggatgaagataccctgtgcaaagcctcacacttttgctgttgctgggctcactgtgtgaaattccctcctccctccttccaccttccctatgctgaactgccactcctccatcctccatggccagctaagccaacacctccccacttcctcctgacaacccaggcacagccactgacctgtcccatggctgtcacagccctttcttgggctctcaatggtatcattgtcacctgtgtgctcatgagcctctgccactcaactccaagcacatcaaataaagagctcaaaacatatcggatactcaacaaatttctgggtatgagtgaatgaatgaattagtctgtaagacaggatcacactaggtgattgttctggctacagaacctgggcatgtcctatatgtaactcctatgatctcagcctccacataggtaaaaaagggctctctatctcctggcagaatctatggttcagaccatggagatgtatataaataactgagctgaacggctaacatggtgggcgctccacagatgacagccatagttactgtctttaacttctacttttatttccagtgaagtctttccactcatgtttcttaattctccatctccctcactgcctatccagttcagtgctggactcctggaaccagctcattgaaggtgcattgtcggattgatcagctgaatggcttcttaaggcttgtttccaacctgagaactctgagctgagtactgttcttcctccctcccagcctcccctgagactgaaagctgagagccatacagagatcactcctcttccaggctccagaagctgaacatctgctccgtttggagttctatgcactgagctgagttaggacctggggggacaggaacagctgagcctttctgctccaaaaggcagagtcatttcagccagccacccagcagctgcctagcccctcccagacacccccagggatgctgcacatgtggctagggttcccataggaacctctgtggagacctgccatccctgcttccccacatctccttttggactcgtgagagaggttaggaggaggaggggaggggaaaggacaggactgccaggcactttcatacacaaacacccagtctcttaatcctcacaataactctaagaaatatgctattgttatccttgtggtactgacaaggaaattgaggcccaaagacatctaacccaagttcacccaggtaacaaacaagagaactggtctgccaccttatcagtttgtactgacacagtatcagtcagtaccagccagggatctctggttgcaagccacagaaaccaactcccactatcacaagcaaaaaaattgctgaaggactgtggtgccacaccagaaggaaaggaaaagctgaagacacatgattggaaaggacaggaagaagggcagcgtcaggatctgggtgccaggaacggaccatcatttcattggaataaataaacttctatttttaaattcttttgtctctccatttaggattcaggtttggggaggaagctgggcccagtgccacttgttggctggaagaggacagactactgtaattgacagtcctaccaagcctatattcaatgggatagggactgcccctccctccaaattgggatgctgtttccagaagaaaggggaatgaatcctaggcaggcggaatcccaagctcacctgactgcaccatgctgtgatgggctgcagggtgggacagtttctatggctctctctaacggaactagacccactcaggaggcagcagtggttagaagatgggtactgggaagaaggaagctggaagtgatggtcttcgtttttatgggaacaaaatgcatttacatctcaatgttaaccaccctgttaactgacctctcacatcccaatactatctctctctttttctctttacccagtattgaattcccaggatcccagagaattattagtcaccagccttgattggtagaaagagtcctagtcaccttctaatattctatatgatttacttttgttaattgttctttttttgtatagacgggtctcactatgttgcccaggctgatctcaaactcctgttctcaagcgatcctcctaccccagcttcccaaagtgctggcattcaaggtatgagccaccatacctagcccatgttgtttattgcatgactcccctgtcccctgtcccctttagagtgtaagatccaggagggcagtgattttctcctgtttgttcactgctgtctccccaatgcctaaaagaagtgactggcacagagcaggtgctcaataaatatttgctgaatgaatgaggaggtaccaatctcttcaacaggcatttgggatgcaatgatgaaccagaagacagatcctgacctcatggaatttatagcttccatgactttagtgagacagaaacaattacaaaaacatgtagcaaaagaacaaaactaaaataatgaaaaattgtgaaatatattttgaaggaaacacacaaaggttttaaaaaacagaactaagagggtaggaaactacttaagatatggcagtcacagaaggaaagaaggcctctctcaagcaacttttaaatggagacctgaagggtgagaaggtgctgaccacaaaaagtgtgagggccgcttcttccaggcagaggaaagagtatgtacaaaggccctgaggctggaaataacttggtatgtctgaggagctggactgtgaaggccagtgtggttggagcttagtaagcaagggctagaggcctacaggctgaggatggagagtgtgccaggcgctgggttgacagccccttacaggcgatggcatggagcttggatggcattctggatacattgggaagctatcaaatggtttttaacattcgtgcttgaccccatttgcatttcaagctgatcattctggctactgggtggagaatgcatggagctagggagtgggggaccagttcgtaggcaactgtggtggtccagactggggctgaactcaggtggccaaggctcagaggacagtggaaacttttgagtcacttctcagttatagtctccatgacaggtgctatcatcaggctggatggtatcaccctccaggggccacaaaggcacccccccttaccagcccactcccagcctgtgggtgatggatagaccaactcatggtctggctaggccctgggcctaaatgacaggtgacggatggggttggaactaaacgctctgagccatgtggccaatgcactgttccaaggaagactttggaggcaggagttaatttaaagaaaggagtaggggagctcaatatcgcttcctccactgctcaattagtggagagagctgcagggagctggaattgtaaagacccccttaatcatctctgtctgcctggcagcgtgcaggagtgtggcagggataattgcacctacccattaacaaatgcaattaaggcgcctgggcctctagcacccccttctccaattaaacagcagatgaggggcccgtgggggtgggctttaagatgaatcacttgaagctggaaacttggagcctggaagtctggacagagaggcgattagagatgataaaatcgtgatggggaaggagagactcatatccaataccggcctgctccagcttgaggcccaacccacagttgggcagatattctttgggacaaattagaagaagttctgcttcacacataagaaagtcaatatttagaacccaccaacaaccacttccagccaagtgcttcccctttgccaaggacacactcactgagtgtctagatacaggtgaagacctgaataattcattttgatgagaaaccgtgaggtctgggtatgttggcagggagggtccaggaaggcacgttcttgtcctgtgaagggggatgggggtggaggaaggggacttccatttgtgggcacctctaatatgccaggccttgtgctccctccctttccatatggcatatcctttaatttaatccagatcccaccagcctcacacaacaaccacgatctcttcattgcagtgatggaatagaagtttggagagctcaagaaccttgtctaagatcacataattagcaggtggtggagctggtggagctgggatttgaaccctggtctatgtggcttccaataggccactcccctatgctgagatgctttgaaattgcaactgtcaagatcttgccccttgtgcattttgatgcccccatgagggtggactcagggcaacatttcagatgttattcccaaatctctccctgctccccttggctgaatccctgaacttctgaaacaaggcctgtctgtggttcctgttgtggccttgaggtaggatttgacaagttgtcaagtcccgaggtgctgaccaacatgctcatctcaagctgaaataataaaataaaaaatctctcctaccttaattgcctctccctattctctttatgcgtttcaccaattacaaatgctatgaatcattatgcatgtgtggatcatcactttcatttagcatctccaccgaagctccaggtgctgaagtgcataattgaaaagctccacgatttaagtttgcaaagaggaggctcagctcctctgaacgtcacagtgtgcaggtctcccctgctggggcctagacagcagccaggaggtgacagcctgcatctgcccgagaacccagccacaccaaatgagtgctgaagtagttctgcttttgcccaggggagctcaggcagtgagtaatatgtttctaaattcccaattcccccatcttatttccttgggaactttgcttttttattattttttattttattttattttattttgttgctactgttttcctctgtggcttcagagagcaacaaaagtcactgggttgccatctgctagttaaccccttccttcaagaccttcctgagctaactccaggacacctgttcctttctgcagcctacattcttcctgagtgtagggctctcccaggtctgcctcactcacttctgactccataaaagctcccataagatggaaggagaaaggggcagagatgaccagctgcagcttggcccaggtgaggaatgagctgcctgtctttaacagcagctaggctctatcctagctgccagagggagggctgtgtcttctcctgcacccccataacctctatgacattgctgggcatttagacatggccatggagtccttcctctctcctcccctcctttctttcccaagcatttcccaaatgtctactatgagtctgcctaagtccaggggctgaggactgagcaataaataaacctgctccctgtccagtaggagagacactccagtaagaaacatatagtaataaatacaatgtgagaagtttttccatagatggaggagcaaagacttctctctgggagcagggaggagggaatactgattcagctgggagaggcaggcatttgcattcagtcttgaaggctgaatagggcagggtaggcacagtgattccaggtacgggaaaagcctaagccaagtaaagaaaggcacaaaagacatggcatgttccatgccacctgggccctgctgcttccagggccctcgaatcatcagagtttcatagagccagccccaaaggggaggatggctctaccccctcagatgtcagccccttgagccagatgggagcgctcaagggctcggacacatgcccctccacttctagttaggttggagtggaggtggggaggccacaagacacctggactgaggccagcattccagattcagggagtgcccttggcacacacatcttggatgacaacctacttctagcatagtctggccaaaagtaaggatgcgaatgcacgcacgtatacacacacaaaaacacatacacacacagaagctgtgggcacagctccctggaccatctcactgccaccctcctgcccttccatgagcaggttccccttcacaccaaactgagcaccaccaatcacctgatgccaaacagatggcgggaaagagttcttgctctgagtggggatggcggcaaggtcactgctgatgcgtgaggggctgggctgcagggcagtgaaaaatcaatggatcacttccctctcgtcacttttctgccacagattgagctgaaagatagttcagcttggagctgagaagcaaagtctgtaaggtttactctctcatacctttttattttccctcttcttttcactttctcaattttcaacctccattcactcttctctttctcctctactccatcttctctttcctttggtgcggggaggaatggggatgatgaggggactatgggtgatgggaaaaaagaaaagcagcccctgtcatttagaagctggcctgacccttgcagctaagccatgctattctcctcttggatctaaacaatctcacagcataccagcctcagacagattaactccgaggccaagataaaatgaaatgaagcaaggtgacttcataattttacctaaggtcagacaagaatgaggtcactctgccacccacaaaataccaagtagcccctctcttggccaagatgaatgactgctacttcttttctatttcaactttatcttcattctagtctttcccatagtccctagagatgagatttattgagatacccaatcatagaattgcccctgcttactgacagcatccaatctagagtaaccttcacttccttggaccccttcccaagttgtcccatcaaagccaagattctataatcaattctaatatcctctcttggagagaacacaccccatggtttcccatgctgtgccttctccctctctgcagtaagcgataaacccaactggtttaactgtgttcctggcagtctttggtaaattacaggacactggcaaaattggaggtcccaccaagattcacctgagactttcatagctttaaccaggaccctgactcagtaacagttcacatatcgtggaggggcgggcctcaggcactggtatgttttaaagctctgtaggtaattttaaaaggcaacctgggttgggagttggtggggaacaagttgctttaagagtctctggtgagggtcagagggcaatgcctctaaatcactgagttcgggacctggcccatggtgcccagtcattgttgttggcttctgtgacttattcactctgctgtccctctcaataagcttttgttgaatgaaaaatgtaataggtctcaaaccatgctgccattttctccccaaactatttttcccctggctccagtgttctcatggcactggaggctctgattcatcccatcgccctgaccatgtctcccatcagccccaggccctgcttccctcttcaggcaggacctcttggcaccccttcctttctgattccacttagtagcttgaggctctgtggtcttctctgtgcagctcaccatggccagaacagatctgtctagatattggcttgaccatgtcatgcctctggctcagatacccctcatggatcctcatcaccccctaataaagtccaaacccttgtcttgacatttaaggccttccataatccagccctacctcacgcatgtatcatacttaaaggttatacctagtagccccatggacatccttcatgccctcaaattattgtgctttgcttgtgctgggcctgctacatgaaatgccctcccatcattatgtctgtataaagcctgctcaccattcaaatgccagctccaatgctacttcctccatccctcattgcccatactaaaagggactgctgcccctttatgatctaaaactatcctctttaaaaaacaaacaaacaacaaacaaaaaactcacttgtgaccctttatcacatgttaacctgaattgtgactatctttattcacctttgatctatgtgggatgggagccattccataccagtaggttaagaatctaggcttcggaatcaggaaaccctgggattgtaatcctattccctcctgttaactagttcagtgaccttgggcaagtctcttaacatttttgaacctcaacttctcattcacaatgaggggagcctgatagggttatggcgagaagtacatgagataatcacatgtgttgaatgccttgcacagaatgtggcggatataatagttattataattacaataagaatagttatcattgctaggttgaagtctcctagaggagggtgcctcaactttagtgtgcacacaaatcacctggggatctggttaaaatccaatgtgattcaggaggtctggggtgggcctgagattctgcatttccaacaagctcccaggtggtgctgatgctgctggtccaaggattacacttggaatagcaaagtcctaaagagcaaggctcatgtctagtgtagcaatatctctcttgcaggatctagcatggtttcctgcacagagtagggacaccaccatttttttaaatgaatgcatcgtcttgatgatggtagggatggtattgcacatagccttctttgctcggaagatcacacacacactgcatacacacaccagctaatctaaccttgcataggactgagatttcccaggggcccaactgctgtgtttcagaaatcagagctctgagatggaaccggctgtgcactaaccttatagccctgattaattccctccctttgtttgcctcattatcatgattaggttctgcccgtagcatagcaacggctaattgtaggctggttgcagagtgcataattcctgctattaaaattttatcgaggcttaattgtgctcctttttgctgcggcgaagcttcaaagtttcagaagagaggggatgtggttagtgggaactgatgatgttttaatcttagcaagccctgtaaaaccctactctgcaatatcattgaccttgagatggtttcctgtggccagaaagaagcccatcatttatttattaacccaccagaaggtctgcaaacatcccctgtggccaggcggaaagcatattataggtcaaatgccattacagaaagccccaaagggctggaagaccaaagagtgtggccgtgtgggcattagggtgggggaggttcggtggggagagctgcactttgcacgtggaagtgggtcagtgtgcaaaaagttgtgtcactccttagacacccagtggcctctcagtggacctccaaaacctgcagtagaattgacaggctttcaaggcattttccaggaacacaccaaattgcccaacttgtgcttagtgggaggtggaaagaagtgaacccattagcaggtactttccacaaatggtttccaaacccaactgatcactagtattacctggggagtttgttagagctgcacatttccaggctccagcccagacctacggattcagagtagggagggaggctggaagtcactcctcaggtggcgcacttatgctgagccactttgggaatcccttacctgtggaaagaaggggcttcggcaatgtaaaaaagacagcagaacgagctgcttcttggggaggggtccacctactcagcttagctcaaactggagccacaaggcctaatgatatgagatggctctaagtcagtgcttttcaaatagaagtgtgcatcagaatgccctggagaacttgctaaaacacaggttgctgggccctactccccacagtctctaattccttaggtcaagggtagggcctaagactttgcatttctaacaagcttgcaggtggtgctgctctaaggaccacactttgagaaccatcgcctttggtgattctccaaatctgaaatctggaccaaatgtgactctttgaaaaggactcagttgtgtttctcagtcctcgcattacaacactgctctacgtgaagactccatccttgtgtcttgagcatctttctataatccagaaacagtggcatttgtcatcaatcaagctttgacttgagatattatgaaggcggagtagagcctggggttttgtttttaaacacagttaaatgcagataaatccactgccattttacccttattaagtaaagcaaggattttaaaaggacatgggatttcaggcaccacttaaacaaagggcaaagcattatttgatgagctggcctcaagctgggaaaggctttagataatacacaatgatagaattatggtgagtggagaataacaataagcacatttgatggagaggagatgaattgtggtgaattgtgggtgcggggaatggtgaaagggagaaaattcagagtaagtgtaaagaaggggttgtaactcaaaggctaggcagatcacagaaatgcatcaggcagacaagccagaccaccattaaaacccatggctccaatctgaatgagactatatggaatggtgaggactgtggtaaactggacagtcctgggccctctaacaagcggaggcctcaagtcagctcttgccagttgttgccatgaaagaatgtgggcccaggagtgcttgcccttccttattttcaaaagaagcttggaatgtggattctaagataaaatttccctattttaaaaacctttgccccaatcataacatgcctgtaggctatcagtttacaataatagtttagaagttttaaatcctaattcatagggatgttattttggaactgggaatagaccaatattttttcccttttttttaaggagggaagggcaggtagtttataaggagagggaaaaaaaatgagtaagatggggaaggaggatgaaatcatggaaaacatggtggaaaagacttcactactcaggcggagcttggaggtttacacagtgctctcttctcctctgtataaagaatatatcactctgcaacatccctggtgtaccacactattagtttggtgaccattgtggagtcccctctcgcaatgactgggcttggccagcaggacattagcaggtatgatgcccgcaaagcttgtcaaagacttgcaccctgaaatgcacgctgttggacatctcacttgggatccagctgctgtgtggaaatgccatgaggaaacgtatggaggaaagagaggtcccagcctttcaactatacctgtcaaagtgccaggcatgtggctgggcacggtggctcatgcctgtaatcccagcactttgggaggggccaaggcaggcggatcacctgaggtcaggagttcgagaccagcctgaccaacatggagaaaccccatctctagtaaaaatacaaaattagccgggcatgatggcgcatgcctgtaatcccagctactcagctgaggcaggagaatcgcttgaacctgggaggtggaggttgcggtgagccgagatcgcaccattgccctccagcctgggtgacaagagtgaaactccatgtcaaaaaaaaaaaaaaaaaaaaaaaaggtgccaggcatgtgagcaaagccagcttggatcctggttgtaactacatgacaacccaagagagaccagcagaagaattctctagcccagcctcagtcaacccatagaatcatcataataaaaagattgccttaagtccctaagctttggtgttaagcagtgaaaactaacagaaacacttagtacgtagctggcctatgaatcagataggatcttgtttggttagacgtaacagaacacctgataaatagtgacttgagcaagtaagaggcttattctcaggcaacaagaagtctgcttttgtttcattggtcagaaccagctgcaccaagggggactgaggaagtgtgattaactgggcacattggtattctgaacaaaacagggtttttgactagtaaggaagagggaggaataggtgtatattttgcagtgtctgccacagccgtcttactaaaaaaagaacaaacgtgtttctctcatgatttttcccttctgtaccaaatttagtcataaaaccacaagcccagcaacccatacagccagcacacatttatcccatgtttgaaggaagaggtctcatcttgatttaatggctcagcattttgtatttgtctgcctgcttcttccaggttcatttcataaagagctgattgatcttgaacttgatgcagcccattgataccatcactactaataaaaggtttcagggcaatcaactttaaattggaagcaatggagatgagcaaacattttcaaatgagcatatcttctgcaaaacttagcagacttccaggatggttggtacaagagaagaggtcatagaagaagctaaatataaagtttgcagttctcatagttagcctgtggccatttcaagagttagaagcgccttggcgggagtggggggagaagcaataaaagaaaatgagattgaaattcactcattttctttctttttagcaacttcttggagagaggaaaaggagatgaatgagacataatatcacagaacttagacttggcaatgctctcagagatgaattatccagcctttcactgaattgcaaataatagtagctagaatttattgagtgtttatcacatgctaagtgttatgcaaaataatttactggcaatctttgattttacctgcaccccatctctaaagggtagtatgattttaatgtccactttacagacatcaagttaaataacttgttcaaggccatggtaaataaatgggggtaccagatttcctggctatgtgtattgcctctccttacttcttttgaccccatcccataacaatctctgctcacctcttccaggtctccattcctctagacaactcattcctatttgaaaaacccatcctattaagttgaagtccgcttttctgaatctctcatcatctggtctaccctctggagcaacacaggctgattcctctgacctacgatagtccttccaataatgcatcctctgagctttttcttctctatgctaaacgtctacagccatactaaccgttcccttcttaaatgctgtgtttcttcttctatgtgtactgtattcaaggaccgcaaattcaaagttctacagacaccaggatagtaatgaaaacaaatagagcagggtaggtatggtaaaatcatatggctgcctcactctttcattctcccacttttcttagagacatggatatagagatgctttcctctacaaacccagtgataaaaggcaacgagcactcaaccttgctactgtgggacaagagggagtggtgagcactttggcaaactggcagcagatgcttgatctaaaggacacaggtgctactcagagcctgccaggtgtttatagtaaaggagggtgacagcttctctgagcttttccaaagctactggaactctgggttttcatttgaaaacttttcatctttatcagattttttttcaatttttcatttttttacagtatcgtgtggccgaaacaatattctacaggctggatccagctcctgggctgctgtttgacaactgatgttgctggtcaccagctggactcactcccctgatgaagtctaaggccagtggaactcacccttcactaaacctacacaccacgcttctaggaatgcagactaaatttgcaatcatttttccagcagttgtgtcatattatactttaaattcacacgaaactggtggctaaggacctgcaagtcttcatgtgagtgttgtccagcctgacctctcaaaccatcttgtgcaatgatacgttgaacctacctgcatggctttgcatttatctctgttggtccccattctgtcttacagagtttgtgctatttttccccaacctgcttttggcacagctttgaacattacttcttacatgaaatcaccagctggattcagtaactcagtgaagtctgacaagtcctaaaggcattaatacaatttttgattaagcctggacaacatagtgagaccctgatctctacaaaaacatttttttaaaattagcagggcagagtggcacgtgcctgtagtcccagctactcgagaagctgaggtgggaggatcacctgagcccagaagtttgaggctacagtgagctatgatcatgccactgcactccagcctgggcaacagagctaaaacctagtctcaaaaaaacttggctagaaatgtgatgctccaaggtaccccaaatgtcaccaatgcactaatgaacaccccttgccttcagagtaaaaagaaactagcctatgttcagcacctgccacgagctcaagactgcccagttccctcattctcacttcccatctaatgcagagacccttccagcagctctgccccagtgaccaaggaagaaaccccaggctgtcctccagataagtctgaaatctccactctggtctggaattccaagaatgattcctgattgaactgtatatttggttctaggtctcaggttcacccctgggtataggcccacactctgcagccccaggatcactggcccctgcccagtgtccagcccaggcagctagccatttgcctgtggtctgagacagctcctgcttgtccaggaggatatacactgtgccaggcactgtccatggcactgcaacattcattgtttcacttaatgatgaacccatttacacatttacttccactgccatctggcccacgtttttcagttgagcctttgatttatcaaggaacttgtatcattgatgctcttcctgcctccctgttattgtaactgagagcagagcaccaagctgtttagcagcttgcataaagacagcagcacatgctcactcaaattccctcccttttttgagctctttgtgcctcattattttcattgataaatgaggttgttgtgaggggcccattagtagatattaggcagttgtaacagaactgggtatgtagtgggcactcatgaatgttagcttgaaggagaagcagttgaagaactagtcatggtcatctcctggactagcccccagtagccagagggaacacctctttataaggaaatgtcaccaatctcctaccatcaacaagctcagcagcaggcactccaagttgtttttctgtcaaagggaaagatttggttcaagccatctgtgtggcccaatggatggccaatggaagacccagcatggtcaattaccttaccctgtggctttggatcaattgcttaacctctctgggcccaagttcttcatccacaaaaaggaaatactaatatatagcttacagaattatggtgagagccaaatgagattgagagtaaaacacctggcacatagtaggcacttgatatagtaatgatgatagtggtgatgatgaaaatacccagacacatgtattgtcagtgaatcttcccagtgagcaaaagcagccttcctttttttgtcctgtcagatttgcaaaaattaaattacaaacttattgcatggtcattatttttaaaagcaaacacaatacaggcatttataaactaaaataaaagttggagtcctcctcactcccattctactcttcagaaagagccacgttaactgttcggttcatgcccttgctgatgttttcctacacaaacacacacacacacacacacaattttaaagcaacattgggatcatactatgcatattgttctgcaccttgcttctttctcaaagcaggtgtcatggccacttttccaagtgagagtacatggagctaatccattgctatgggctgaattgtgtcccacccacaaattcagatgttgaagccctaatcccacagtactttagcatgcaactctgtgtggaaataggacctttaaagaggtaattaagttaaaatgggattattagggtggaccctaatccagtatgaccaatgtccatataagaaaaggagatcaggaccgggtgcagtggctcacacctgtaatcccagcactttaggaggctgaggcaggtgatcacttgaggtcaggagttcaagaccagcctggacaacatggcgaaaccccatctctactaaaattacaaaaaattagctgggcgtggtggcaggcacccgtaatcacaactactcaggaggctgaggcaggagaattgcttgaacccgggaggtgtaggttgcagtgagccgagatcatgccactacactccagcctgggtgacagagcaagactctgcctcaaaaaaaagagaggagatcaggacacaaatagaaagaaacaccagacatgcccacacagaagatgactatgtgaagacacagtgggaaggctgccatatgcaagccaaggagagggccctcagaggaaaccaaccctgctgataccttgatcttggacttgtagactccagagctgtgaggaagtaaatttctgatgtgtatgccacccagtttatggtatttgttatggcatccctagcaagcaaatgcatccatcctttcttaagaaccagagtattccattttatagatggtacataaaatgtgttgtggactcttatgttttttccagttttatgcttattactaagagtgcttcaagtaatatctttgcaatatactttgtgtacatatgtgaggatatttgtaggttctgttcccatacaaggaatgactgggttggaggatatgcacattttaaatgatgtatgaatttactgtaccaatgaaaactccagtagtgcaggcaaattcctgcctttctatacccaccaaagcataatttcaaggacttatattctgtggccattaaaatataatgaaattgacaatccaaaaaagtctgacactcttgaccttggctttgctcatactgaccaccgctgcctatgccaggaccttggccccatcagccacctgcgagaacatacaaccttcctaaacagagaaagctctcaccagactcttcactgtgaaggcaaacttgataacaacaaatgcccatgcttcaaatagaagcattgattttcattttttaagagtataaatagatttgaatcacacatagtatattggatttgggaagaaaatatttcatgacaacctgccaatatatttgttttcttatctttcaacaaataagaatggagattaaagactgctgaagtgaagagaagctgacaatgccactcagaatggccattctgatacgcattgaaatttcggaaatgtaggctctagaaaatatatatatatatttaaaattgttaactgtagcactactttagctccatcataagcttcttttcacccttcctccttattcccctgacacaagtcatgtttttctcaagactgacataatcaataatctctccaaaagagattcctggatctcaaatcccggaaatatgggcggggggtgatattgtgtttctgttttctctttgctgaaagaacaaaaacaaaaaaaataatgatagttgatccatgaataaagtacaaatgtggcctattgtcttaaaggtacagggacccaatccacccccatgctgtgaaagtgaccccaatggctatggatcattctcatcccctgaatcttggggctatgtctgttggtccaatatgtcctacaaactaaataggcagtggaaatttaagtaaatagtattcattaacattgtgatcatgtgtggcattttctattactaaatgatcctagtacacagattattcacttaaataatcaatcactgtcaacaaattacaggatgcagagaatgaaattagcaaaatgaactatgaatgtaaaattcatttgaaattcaatttagtgacaacgttagctttcaattagtctgcccaactgtttgaatgtcttccttttgcattgatttttaaaaaaatgtaattaacctttttactgttaaattgctgttgggtgcaacaatatcattgttacatggctcctattgctggggagtgaaaggattaaatgatgagtcaggatgagggcagtggagtggggcttctcctcatgactgaagggctggggaataagaggagcccaggagcgggaaatggatgttgtttgagctgaggcttcccccacgggtgtccggtattgctgctattgtctctagattcttggagaaaccttctcaagaccatctcctgctccagatttcttgctccctatttcacacaaaatggtttgtattctacatttcctgtcaacttcccagaaaactcggccccttctctcactaccttatttcctttcgtgattctctgacaccttttattcaattggtctggctggagagctggagtgtcccatcagactccagctccttctcagctcccacagacagtgccacctcttcaagtcttcttccagtcgaactcggccactctcttcctgcttgtgtctgtggtggccacagtggtctgggtcctcatcgccacttgctttgttgcagcattgcattgtggcaacctcacctctaccccacaatccaccctgcacacttctgccaagctttaacagagcactcccagactcaagaccccgccgccgctccctgctgcctctgcgactgagcccaagcctcccttcaaaggccacccctcaccacctgtggggcgtgggctcccccacttcctctgcctctgtgcccctcgagtacaggttgcccacttcaaattagcctcctccttagcccaaaacgtgttgtgcactttcctgccctcacacctttgttcttgccagcttctcacctggaaagaaaacaccttccatttctctttcttagtaaaatccttcttacccaatgcccagctcaaacctcacatctgccaggaagccttccctgccacaccccaggctccagtgatccgtcagcttcaaacggttcaagaacttattgcctgggacattccttttgatctttaataacacgctttgtgattttcctctgcactctcagctgaattgtacattctttgaaggtagggacacgccttgtggttcctgcttcttgccgacagtcttgcttaatgggcaatggcttttctaagccttttttgaaaaaggacggcaccaatctctctcatctactgtgttcaggactgtcttgagggggacagctcagctgtggtgagaaccaggaagcctatgcattggagcagggtgtggtgggtgggctggccggggttacggtgaggcaggcagcctcaaggagcaattacaacatgtggacacggtaaaactgtctcttgtcagctgcactggctgagataatcttggttctgaaccacatccctgcctgttccagatcacccattatctctccagagctgccgccactgctgggagacacaggagtgtttagctgtgccaggggtctgcagatagaggcagtttcttatcccgtcttcacgaggagctgcagggaaataagtcacacttagacattaagaggcctccatccttcagcagcctggcagcagaattctttatgggtctgaggagaatctccatgaattattgggattcatccctaagaaccccatggggatgtggcccggatgttgaacctgttccttcttaggtctgagaatagaaagaaacagcctcactcctctctgagcggtagctcccttcccttagcttccaaaagccaactcagttctccttggtactagctagctgccatttatgaagccatcgtttgtgtgccaggagccatgccaagtgcgtcacatattttatctcgtcgaattttcatagcaccctacaaagaaaagttctcattttagagatgggattccttaggctgggggcagttagcaaacacagctggtcagcagagctgagtccagatttcctctttctttttttgagacagggtctctctctgttgccccggctggaagtgcagtggcatgaacacagcccactgcagccttgacttcttgggtttacttgatcttcccacctcagcctcctaagtagccaggactacaggcacatgccaccatgcccagctaattttttaatttttttgtagaggtagggtctcatcatgttgcccaggcatggtagcctgaactacatccctgactgttacagaccaccccattacttcttcagagctgtcgccactgctggaagacacaaagaatgggcagccgctccaaaggcgaactcgtgggctcaaacaatcctcctgccttgggctcccaaagtgctgggattacaggcgtgagccactgcgcctgggccagatcccctctttcaaccaccacacaacctgcctcctaacccaacaggtccagaatcccatctcctctgggaaggcccccaccttcaggttgcctaaatcatgggattgctgccaacatccatcactcgtttctttctggcctgttataaaatgatggcatcaggtgcttctcctgacatgtgggctatgaaaatgtgtggatccgggatcaccatgccatgtttcccatgaactaagtatttgggcaggaatcaggttgtccacctccaagcctggctggctagactctcttcagggtgtcaagacttaaaatgagggtctaggtgggttttaggtcattgtgggtgctgtgttgcctttcccccatcccatatactctttgggatacctttgagataaagtcagcagggcaagctcttcccagtccctttcttggatttaagttctggcttcacacatgctgggtgccttagtaaaggacttaaactctttgtgcctcagttttctcctctgtagaataaagacagcctattacattatctgagaagcaaatgagataaagaatattaaacatctaacacaatatctagcatactgtgggttttccacaaatgtttgtttctttcagatcccaaagaaataaccatgagtataactggaactggagaataaagtctgaacaacacacacacctcagactgcatgcccaacctccaggtgagcaggacccaggcccctctatcagctcttagctcattttcctattactagagctcttactcaggctcagggtagacagcgcccttcctaaggaggcagagagacaaatgggagagggaagcaagactagccccacccactatgcttctgcctttaaggacaccgcggaggttgcctctcccctcctcctcagctcactttgcgtacatcttacactagtacagacaactttgtggaggtttgcagagaaatggagcagtaattgaagggagtagtggagtcaagggagggctctttaaagatgggaggtgttatttaacacatttaatgatcaaatagaaaaattagtggaagagcaaaggatgcttccactgaatctggtttggccattttatctggcctcctttcatcccccttgaattttaggctaaagttctctttaccatgtcagtgactcccttcttatactcagtagaagctgttcatccggtggaaaaaactttggaatgtgggttcaaatcctggttctgcccattattggctgggtagcctctctgggcctctatttcctcaccattaaattgaaataataatgctttcctcttgaatttggtgtgaggattaaaggagtcatgtttggcctggcccagcacttagtgggagctcaaaaatggtcattgttgttgctaccattattttattgaaaaggttcttccaagtctttgtgatatgcaccaagtcccttgtgaggagccaaccataaactacagtcctcaacactaatatgtgggctcttattagcatgaacagtggctgggacttgagttttcacggttgttctgacagagccctccttacctaactctttgcatacctgcctgggtttgccactctctgtaggatagtgttcctgggaactccgcatgagcctgatgctgcctcttgcaccctgaatgtgtcagacagggaggcagcttccccatcctgggcggggtgctgcgagatgagcagtcactctgccttttaaccccctccctgttccgtgttgatgactgggcaggtgggggcagttgctgtgagtggacgcatctgctgtggcttgtcagcctgtgtcagactcgaccctgagggcagatagggtcccagctaatgaaaagcctagagccacagcctctggggtagctccgcagctgctgtctctgttttctttttccttttcctttgtgcttggcagttctggccctcggcacagcaagaccagcactagagacacaagcactgaggttcccttctccaaagatcaagttacagaacacattctctggctcaccttgaagaacaaagacttgagaaaagcagcctgcctggggatgaggaggcggctgcctgcttgatgtaatttcagggtctctggaaaaatctcttgagctccaaatattttcctgctataaacctgagaatgccatcattggagactcaatctttttacatttggagcagtggttctcaaagtgaggtctgtctctgccccatcccatccccagcagcattgcatgacttgggagtttattagaaatgcaaattcttgggcccccaccgcagaccccctgaatcagaatctggaggagggagtatctgtgtttaactggccctgtgggtgattctgacgccttagtaaccccacagaagggcacgtcacccaggaggggggtactcatcagcattatagctctgatttactgctcagcttgatggactgtgaggaggtgcagaaagggacagggacaggggaggggagggaatgtcttgtctggtgtagagcagtcagacaacctggcatcgactcctagctcctccttctccctctgtggccctgggcaaattacttcatcttttcagctttcctttgctccactgcaaaattcagcttgtgcaaccaactcacagggctgaagatgaaatgagatatagaaagtactttgcacataataggcgcttaaagagtgagcagttgctctctccaactcacccctacatcctctctgatagagaagaggtctatgctgattggcatatggtagaagggaaggtaccagaggtggggattcatgtatcataaaggcatggaccaggaaagaaaggggctagaagtggatgagatgtcaagacacagaaaggggaggagaaatgagaataaggagctcccctagactcaactcatctggtttcttccattttgcagggggtggtcctaagaccagggtctcataacctgtggcccagtctcaccaccaccctttccagatggtgggtagggctgattctttgcttaccttcctcctacctcattctaaccttttcaggtgcatgacttaaaggtctgaagtttccctgcagggagatgactggtggaaatatgcaaatggtgagctttatggcaactcaggatctttagggttaagaagagagctgacagttggtacagaggccaccatggtgacctgacccttgctcagacacagccaacaggcaggaagcagagagcgtcttaagagaaggagaaacagatgtgtgtgccccagaacagcatgcttccctttcttttaaagccttcacatgatgtcttgagcctttgatggcagagcaaattaagatctcagtctcactaggaaggctcacatcatatggctctggggcaattctacccccatttccctatctctccattgccaggaatttcagagtcagtgtttcatcatttatgtaagggcttaatccctatgagaattttcatctccattaagctgtgttctgggcttgggttagtcagtctggattcaaatcccagctctaccatttgttagttgttatattctgggttaaatatttaaactcttcgagcctcactttctgcctttgtaaaatagggacagcgttttatacacacacacacgcacagacacacatatacatatatatgctcgttatttcaagggttaaacatgtacagtgctatttggatttcttatgaatatatttctttaaagctacaaaaagagtgggaggagtaaagactgaagggaatggttgagatcggggatggctaataggtctcacctacgaatgtgggtggattcagaggtgccccaggtacactgcattgtcagtttgtgaagaatcccaaggcagctgactgcagtcttggcagacagcatgtgacagtgtggaaatgtctgctccaatgtgggcagggtcctgaaagcatgtgcaagccacatttgccatctctgctctagttgcttcctgcctgaaggcaaaaagacaggctgtgactcttgcaattacctgagtagaattatagaagccattacctgggatcttcaaaggctcccacagagagagtaacttagcctcttaattgaacacagcctcccagtatcattctggaacgttggagctgtccccagtcacaaggcacagccttcttaatctgataatagtgtactctccaggagggagaagagaactccctctgtagtagcaccagacacagtgcagtgacacactgtgaaccagaaagatcttgaagatggtttcatcagggtggggtgagtgttgggaacccaggggtgggtgggacttaaaggaatcgagcaccccaggggagcctgagctctaactccgtggctattttggatatcaattgctgcttttgtgtgtttcccagctggacgtctgtgaggcttgcaggtgttttacattattaatcagctagatcttttttcttcctaataatctagcctccttccatacctgtgaaagccctttgaaaaacaggcagcagtgcatacattcagtgtttaatggaaggggcagggcagggcccacgtttccattaagcacagcaggctttgtgcctggggcccataggactttcaggggccatgaatttgttttaattgtggtttcttttaaaatcagaagaaaaaaatgaatataataataatgatatagaagaataaatccagcctacattatacttgtctttgtaccaatgcaatcataaaatataacttttaatattttgttatggcagaaggggcccccaaaggcaaaagtgcctagggctgagggaagtcataatgcagtcagtcctaagcatgggattggaaaagatttgaatggggtctgaagacaaagctgcggttctacctcaggccctactgaccccatgactttgggcaaatcatccatttggggttgcagttttctctgtggtccagtgtcctacaactgcaggagaggactgagttcttccctcccctccttttctcagtcctaggctctaaggagataatagctgtaaagtgcttgaacatgtgtaaacatgcaacaggtataataaaggtcagaatcttcagaatccttattatctggagggaagatggagacccgtatactccaggaatggatggctccagagcgggggtgaatgttgccatgacacactaacatctaccaggcaaccaccatctgtcccattcctaagaaaaaaatcagttaggaagaggctggatgagtgaactgggcctttggggggttacgggggctccagggaaactggagccttcagagaatcacacagctctggccagagtgctgagcaggcttctagaatgacccgggggagggagggagaggggggccagagagacactaggtgtgagagacatggccaacctgcatgaccaggagcttgttctactcagtgagtacctaagctgagttgaagaactgaaacaatctggaaattaagggacttttcaaaaataggctatgggagagttagggaataggacaaaggaaagtttgattataatctgctggtctgcggtgtgatgcaactgcctccatctccccaaggcatcgccataaaatgaacatcaccacagctcttgggagttgagttcatgttttggagatgccgctaacagccagcaagtctggcatgtgtgctgataacccacctgcctcatgctcttccgcttcctccttctttacttctcttctccttccctcctctctcccttcaatttccctttcccttttttctccccctctggcctttcctctttctcctcttcccctctccctctctccctcctttccctctttctctctctctcaccttccctctccccttccctctcttttcctcttcttcctcttcacctctggaaagtggagaaaagtgcgtccattggaggtttcccaactgtggggaccccaagctcacagggtttggaagcctcctgaggacagctgcatcaccatccatcatctttttgatgaatggagctctaaatggcttagtctgactgtgatgcaacccagattttgccagtggcatcagtgatttaaatatcattgcttttcttttccttgtgcttctataggatggactaggtgtagagcaatggaggcagtgctttccctcagtctgcgaggactgggatctaggtggccatccccacccagctgtggagcagtcagacagcgggaccctaccctgccagcctacaggggagggacagcaggctgaggcctgccaataccagcaccttcatctgtagggacaaaccaaggacctggcctggcctcagaaagaaaactcctgacccctactctgcccatgctgctgggagagaaaaagaagggagtggtctagaaagaggaaaacaggctgggcgcagtggctcaccgctgtaatcccagcactttgggaggctgaggcaggcagatcacttgagggcaggagttcgaaaccagcctggccgacatggtaaaagcctgtctctactaaaaatacaaaaattggctgggcatggtggcaggtgcctataatcccagctactcgggaggctgaggcaggagaatcgcttgaacccgggaggcagaggtcatggtgagccaagatggcaccactgcactccaccctgggccatagagcaagactctatctcacaaaaagaaaaagaaaagaaaagaaaggaaaagaaaagaaaaggaaaggaaaggaaatctaagactagggtggagtggtgggctggataaaagaaagggctggccgagccctctctacctctcagacctccccaccccagacctcaaagctgccgtaattaagaatcaaagaaatgcaccttcaaataatcgaagaccattttttaaccttatcagatgggcaaaatagtaaaaggttttgaagagttggctactaaacaggtgctctcaaatcctactggaaaaaaatcacaccaactttctgaagacacaatttggaaatacataacccaaaatatattctcggacccagcaattccacttttgagaatttatcctaagaaatcacacatgccattcagaattacccaccaaaataataccagaattattacaactaaaattgtaattttggttataatagtgaaaagtttgagacttagagaagtggttaactaaattgtggtacatttggccaggtgtagtggctcatgtttgtaatcccagcactttgagaggctgaggcgggtggatctcttgaggccaggagttttaaaccagcctgggaaacatggtgaaactccgtctctactggaaaaaaaaaaaaaaaaaaattagccagccatggtggtgcacgcctgtaatcccagctactctggaggcttaggcacaaggatggcttgaacccaggaggtggaggttgcagtgggccgagattgcaccactgcactccagtctgagtgacagagcaagattcagtctcaaagaaaaaaaaagtggtacatttattcaatgaaattctgaatgctagttaaaaatgattatagatatggatttactgacatggaagatgttcatgatatactgctaaagtgaaaaaagctggtttctgaacattacctatgttatgatcctaacacaggataaggaaaagaaaaaaagaaaagagaaaagaaataagcatatcagttatctgttgctgtataacaaattacccccaaacttttcaccttaaaataacaaatgttaccttatagtttctgtgagtcaggaattcagaagtggcttctggctcatggaccgtcctgaggtcgtcgttaaaatgtcagctgtggctgcagtctcctgaagcttgcctgggctggaggggctgcttccaagatggctcactcacatggctgcgggcaggaggcctcagtttctcaccacatggacctcttggtagaactacgtgagtattcttggggcttggcagctggcttcccgtagagccagtgatcccagaaaacaagacaaagattgcaatgtcttccgtgacctagcctcagaagtcacactctatcacttctgcaatatttgattctattgattatacaaattggccctactcagtgtgggaggggactataccacagcatgaatactaggagccagggatccttgagggtcatcttggaggctgtctactggaatgtttgtattcattccttcaataaacagtgtttgagcacctaccaagcaagcatcagatcctcatggtaccctactcggggtacatccataaaaagagagacaagatccctcttctcctggagattaccttccagggcagtgggaggggagagacactaaagaggtaagaattgtaaacagcggtcagtaactgaagggtagcatgaggaaggtgatgtcagaggagcaggcaggggctgggtgacaaggaaccttgcaggccatgcagagagtttagatgttatcctaaggatgatagggagccactgaagagtctcaagcagaacaacgacgtgatctgagttatatgtttaaaagatcactatggctcaatgtggagaatgaattcagggacaaatgttgaaatagaggccagtttggagtttataaaagtactctagtggccatggcttggatgactacacaagcaatcctggtggccatatatttatatctcacaaccatgctcatattttatatatatatatataaaccagcctgggaaacatggtgaaactccgtctctactggaaaaaaaaaaaaaattagccagccatggtggtgcacacctgtaatcccagctactctggaggcttaggcacaaggatggcttgaacccaggaggtggaggttgcagtgggccgagatcgcaccactgcactccagtctgagtgacagagcaagattcagtctcaaagaaaaaaaaaagtggtacatttattcaatgaaattctgaatgctagttaaaaatgattatagatatggatttactgacatggaagatgttcatgatatactgcttaagtgaaaaaagctggtttctgaacattatctatgttatgatcctaacacaggataaggaaaagaaaaaaagaaaagaaaaaagaaataagcatatcagttatctgttgctgtataacaaatatatatatatatatagtttttctttttattctcccacccgttgcctagcagagtgctgggcacatggtaagcaggtgggaggccaagtgaacacagagtattggattgttcgttgagagaccatgtccactttcactgtgtgacagtcactcccattctgtgcctcagtttcctcattcataaaatgtagcaagtgaatgaagccagtgatatgccattttttctttttccttttcttcgattagaatcagcaccctaatagataaaccagatgaaagagagtgcagtggcagaagcagaaggagcctcagcctcctccttctcctctggctgcatgatttgaagcccgttgaaaggactccccgctgacccttctgtccttgaatgctccacatgccatgcatttcataaacagtcaggaccagccaattgttttaatttctgccaggcctttcctgccgccacgttgaaatgctctgttccatgtccctccacctggcggtatctggacattccattgcactccgttttttgcacacggggctgcccagcttgggaatactgcactgtcccccaaggggagggaggcccagcacctgggcactgctgatgagttttcactcatatttaatacgagacttggggcgccctagggaggaagaagctgctttgagatccccctcataagctctccgatgagtggctgcctttccctgagctccttggatgaaaactgtcaggggagatttcctggctcaaatcctttactccctccacgactgtggcccagacactcccacaccctctcagcaaccctgatatcgttttcttcccaacccagtattgcacttgctagccatggacttcagggtaatctcacccatctgagccttggcaccctcatctctaaatcgcggatatcaacacctactattcagcccgtccacatccgtgtaggtattccagttgctacagtattcaaatacatccatactggttggtgaaaagccaggactctaagcccctgggtttccctcaccccaaacactccagcttccccctctgaggcccacagacatccacagaatcagcagcctacaggtcatgcctgacccgggaggaacctgcagatccagctctagtgctataaccaaggtcagttctgacaggttggtgtctaggcctcactggttgttaaatactgtagtattacccttgaccatggtgatgcaagattacgtacatgaggcacccagcacttcagttcctggaacaccagaggaagaataactttcataatcctcatacttcacagcatggggcctcccatgtttgttttcctgttaaagtccagctgcgatttatcctccttcacctttccatttcaccccttgtttcctttactgagagctgagatattgaggttgggacctggtttgtgtgtgctttctaaatgttcttaggtttccatgtggttttatgcctattttgtttgtgggctgacttcagaagtggtaaggtgaaaagaggtgagcccattttgtaaagaagtgagcggtgcaggaggggctattcctagccatttgtctacactggcgcacacacagccctggggttcatcccccattgtacgttaagcagtcaaaactggctggcccatttcacagaagcccaccctgcagactgagagaatcagctctttatttgacttgctgagcactgtggccaagtacacactttgaagttatatactccatgcttctcggtgcctgtcgctggctgaatggtgggccctaaaaggtatgtccatgtcctaacccccaggacctattaatgtgaccttatttggaagcaggttctttgcagatgttattaagtttaggatctcaagataaggtcatcctggattttttttgtgggccctaaatccaataactgttaccattaaaagagaaacacagggcccagcatggtggctcacccctgaaatcccaacactttgggaggccaaggagggcggatcacttgagctcaggagttcgagagcagcctgggcgacatggtgaaaccccatctgtacaaaaaaaaagaaaagcaaaaattagccaggcatggtggtgtgtgcctgcagttccagctacttgggaggctgagttgagaggaccacctgagcctgggagtcagaggttgcagtgaggcagaggttgcaccactgcacttcagcctgggtaatagagctagatagaccctgtctcaaaaaaaaaaaaaaaaaaagaaaagaaaagaaaaaggaaaaaagaaaagaaagaaagaaaagaaaagtaggaaagacacagagaaaaggccatgtgctaatggaggctgagattggaatagcacagctacaaggaatgctgacagctgctagaagctagaagaggcaaggaagtatttacccctagagcctccagaggaaatgtgccctctggacacctagatttcagacttctggcttttagagctgtgagagaatcaatttttgttgttttaagtcaccaagattgtagtaatttgttacatcagccacagaaaactaatacagagcctaacatgcttattggctcagactcagtaaacaaggatgagttaggatacaggagccgctgctacagcaaagaccccagatagcaatagacagcttaaacacaatggaagtttatttctatctcatgtaagagtctgagcataagcagtgagggctgataaggtggctcccaggtgtcagggacctggcctccaccgtcacctcaaatgaaggtcaaccttgtggttgactgatttaatatagcaacctgcccctcccctgccccctgcactgtatctgtgccccagctctttctttttccccatagcacatcttttaatgtacaatataggttgtttgtatcatgtttattgtttattatatgtctccacctgttgggctgtaaactccactggggcagggatttttgtcttgcttattcactagtgtatcccaagtgcctagaatagttccaggcaaatgcctgatgtgcaataataattttttttttgctttgagatgctgaggagggaagatagcttgaggcaaggagtttgagaccagcctgggtaacataatgagaccccatttaaaaatgttttaaaaaaacatttctttttaaaaataaggccaggcgcagtggctcacgcctgtaatctcagcactttgggaggccgaggcaggcagatcacctgagctcaggagtttgagagcagcctggccaaccacagccaacatggtgaaaccccgtctctactaaaaatacaaaaattagctgggctcagtggtgggcacctgtaatcccagctactggggaggctgaggcaggagaatcacttgaacccaggagccggttgcagtgggccaagattgcaccattgcactccagcctgggtgagagaccgagactctgcctcaataaataaataaataaataaataaataaataaataaataaataaaattaaaaattagccaagtgtggtggcccacacctgtagttccagctactcaagaggcttgagcccaggagctcaaggctgtagtgagctataatcgtgccactgcactctagcctgggtgagccagaccctctctctctttctctctctctttttctctctctctgccccccctccattccacctctatttcctaatctgatctctgagagggacaggaaaaggcagaaccaggttcagagtccaggcctgtgactctcttactacctacttcttgctagatctcccctgccccctgaagtggattccaccctgcagcacagcccttctgactaatgggagcagggcagagggccagtgagcctcttttgaccctgatccagggccagagagcattggaagcagaagagaatctgaatttcctcatccaacaaaatgaaaatgccaactctgaaatcaaaagtgatgagaagtagaaaaccaagtctcagagctccttgtctgtacaggccatttggctgactggctgggcacacaatcaagagagagagagagacacagaaagagagaaagagattgattgaatgaagttgtctcactactttttgtactggcaggcacagggcaaagccacaatgtagcccgcactctttccctgtatggctataacccggaagctgcaaacattgtatccactcacatcttggtagccaaaattagtcacatggtcacatttgactgcaaaggacacaggctttattctgagtgctatgtgaccaggcaagttcagcaagtctgctagtaaaggaaatggggagaatgggttttggaagaaaaactatgagtctctagtcaaaatgatggttgaataaagattatgtatttctaataagcgcctggcggagtccaattcagggggataggagcactgaaaaaaatccacatcaatttcacaatgtgtctaagacaaaattcagaaagaatattcaatgtattcattttacagctgagaaaactgagactagagggtgaaatgacttgcccaaggacacctaaccagagagaaatctcgcgtgtctaattccacactgaatcttcttcccttctaagcacaccccttctcctgaaggatgcggcccgtgagaaggacaatacttcagtccagggattttcagcatgaggacttccagcatccgcatcatctgtgaacttcttagaaatgcaaattctcaggctcccacctagacaggggagagggggcagcaatgtgcattttaacaggaatccaggtgattcccatgcgccctaaagtttgctttaggcaaaagattgaacctctaatggggcaattttcagaactcacggcagctttagggatgttcttttctgtgactcctcaaacagcgtgtcatgctctgggagatcatttaggggctgggcaagcagagggctactaagatgaacagaaggaactgaggccacacataggtgccttctactggaggaagtagttactgtggagccaggaaggcccatggcttaggcccagagcagcacctagtctcattccttagcaactcagacttagaccctttcttagccagtggttggctgggctgttcaacaatgtcagcctctttttcttccagtttctacaaaccagcttcttttccctctagacagtgtctgaagattttcactgccccttttctcttctgtttcttttatttttccttttgcctttaaaaaatgcatctgaaggaggagaaacctccactctcctgttcaaccaaatgttagcaaactagaaattagacattagaagaggaaggtggcttaagtgtgggggctcctttgagattttgatcatcggaattttctttacccttccaggcaaagacagccctcgatggattccaatcccaaataaccctgctccaggctccaggaaactcatgctgtttgtcttccttagccttggctcttgctaactcactgcatgactgtgggccagtcccctaatcccactaactcttagtttccccaactgttaaacaagggaattgaacaaagtaagttaactttgtgtttcttaacgttgactatggaaaccctagacatttggatagcaggccacaggggagcaccacctacccacctcctggtgacagcatacctagattacagataaattacccaggaaggacacaatagcctgacaaactcaacccacaaacacgagtgaggaaatccctaatttaaagaaaacagcattgttaggaaggtttgtccagcatttaatttgtctctatccttatgactttggaaaactaggtgaaaaaagaatccctttaaaaaatgggcagacaagttcaagtgacatgtgctcagcttactgtgatgcattaatccatccattcatccattcttttctctttttttctttcttttcttttttgttttttaacacttgctctgtcacctaggcaagagtacagtgttgcgatcttggctcaccacaacctccgcctcctgggttcaagtgattttcctgcctcagcctcctgagtagctgggattataggcacctgccaccatgccttgctaatttttgtatttttagtagagacagggttttgccatattgaccaggctggtcttgaactcctgacctcaggtaatccacctgcctcggcctcccaaagtgctgggattacaggcgtgagacaccacacctggcctcatccattcatttattttatatttcatcttccaagaattatttgaggcacaagtaacaatgctaaaagctattgccttgctgctgtaggacagagttgagagagagagaagaggcagaggaggggcaaaagaagaggaaagagaagcaagaataactgacaagttgctaagataaaaaagagaaagaaggaaaatactgtccctagcaaagtttcatttactaagcaaacaacgcttgctatttttctttggctctgttctcaaaaggcctctgctgggcattatcgattggacaaccgggccacagtcctcctgccaggcagaattcatcaaggcagcaccagcacttataggagatgggttttttggccctgatggagcaggagcccagcaggttgcttgcaggagccagttgggacctaagtgtgccccagggaaaggggaaactgcagtaagatgagagacactagggtggagggcttacagaagttgagattcacttcctctctgggaccaggatactgcagccctgtgaccaggcttcctgctccctgagctggctctacagccctgcacacagattgttggaaggtcttttgatcagccagtcactcgattaaccaatagagccatctttattgagcagttctcaaggtaccctggggaggtgcttgaacaatgccctcaaggcctttgctagggagaaaatgtcatcacacagtttaaaaagagccactcttgaaagtgaatcagtaactttaaacattgaaggaaggaaagaggaacagggtgttactatctgtggcgactgactctattaggagagccgacccagtggtaggaagctaaattcaaggctcctaaaattaaacttttgaaaagtgaacccttcttcttcatgaaaaacagaaggcaatcggcagtgcaaggccatgcctgggagtgaaccctgcaaaagacggaggaggtgttgctttaagatttctgaagagggaaagcccccctcagcaggggtccacgggggccactcagggagaggcagaatggaagagaagatgaaggataggggaaggggtgggaaacagtctcagaagaggctatggcataagcaaaggcaagaccagaagtataaagcgtagttggggcccagagtcatgaactagtgtgactggagccaagcctgccccacattttgggcctgggaagagtcagaagggccctgtgtgcagaaccatggaaatgctaatagctcatatttgtatggtgcttaatctgtatatacagtgtattaacgaatgtaatcctcagaatagttccatgaggcaggtaccactattctccccattaggcagataggcaaactgaggtacagagagacttaagtaactagcccaaggtcacccagcaagtaaatggtagaactggaacgtgaacccagcagtctgcgtcgcaggccttgtatcctcagccactaggctatcctgtctccatcaggattatcaggaaagggagccagagcatgaggaaggtgatgcttgctatttgggacttgttgctttgaggtggatgcatctaccaggcaattgagagcaagggctaccacagagggtggggtgcttgagaatgctatgatacctgcccatactcttcctgtccttgggtagggcagagagggcattttgttttgtttgtcagtgagctggtctccaggacaaggttaaatatatattaaaatgtacacacacacacacacacacacacacacacagagtcggcagcatatcatccattctctcttggctaatacacaggcagaagtctttatgctgagctgatcaatgcccagtcagggcattcttttcatacacacacacaaaaatcaattagtcagtctgaaccaacaaagaggaacaacaggatggcccaactgatgaaacccacttctaagaaagcttatactgtgtagttattcatttaaccttcaaaataaccccatgaggtagatactattattatggtcatttttacacattgacacattccctgtggacaaaagtctttaagataagataaacatttgttggtggaaagagcctgggctgagaatcaggacacatggcttgtaactcctactttgcagcttacaagtgtgtgatgggtctcagtcttctcatctgtaaaataggagcggggttggagtgcagaatcactaaagttcctttctgctaaggctctaggattccagtactgttcccaggacctcatattttcattggcttcctggacccagcctggctgctcagctcctgcccccagctgtccctttactagcaggcacaggctatggcttccatccaaagctttgccttcccaacttgccccagggccttcagtgagcatctgtcatttcttcctgcttcttgttgtgaagtttgggggaagagtggcaccctgtggggcctggccaaaaggccaggttcttccccatctggctgaggacagggaaggagtgtggcagatggtgagcagaactgtccttgccctagacccggggggcccatcacctgccaccctcactctggctgcagtcttgcttggttggcagcacccaccctgcagcccagctagtcagccaaatggcctgtacagacaaggagctgtgagacttggttttttacttctcattgcttttgttttcagggttggcaatttcattttgctggatgaggaaattcagatcctcatctgcttccaatgctctctgaccctggatcagggtcaaaagaggctcactggccctctgccctgctcccactagtcagaaggtctatgctgcagggtggaatccacttcagggagccagggagatctagcaagaggtgggtattgagatagtcacaggctcggactccgaacctggttctgctttttcctacctctcttagagatcagattaggaaatagaggtggaatggagtaggtcacctctgggtggtcttttcagatcttaaacctattcctgtacatcaggttgacacaccacagcccacaggccaaatctagccaataaagttttattggaacactgccatgcccgtttgttgtagctgctttcatgctacagcgttgaatagttacaacagagaccgtatgtggcccacaaaacctaaaatatttactatctggcccattactgaaaaagcctactcagccctgctcttcatagctattctcacagtcataggggttatggaattgcctgctgctctccttttagccaaggctgtgtaataatacacgtctcttgtggccaggtgtgtttcagagctcagaactgcttggatttcagtgtacgtgcactgcatatatggttctattagacatcacccatggtagggcctgggacaacatgccataatcaaatacattcatttttctatagtgaaatgtagaactattccctctacataagataaataagaccacagatatgttcccatcaatgcaagccaggctctaccacctaatgtgttcatgtcaggtcagatgtggctgcaaaatgagttgtgaaagtcagttttggatctcagagcattagggctatcagaattgttgctaaggaactgtgttgtcatactgacgctttattgggcactggagcagaggaactacagtcctctgagggggtgtgatgatctatttggtagattaggaaactgagactcagagcaggcatatggccgaggtcacccagttagtgaagagcagagcccacacccaaatccagatttatctccaagttctaatcctaacctcctttaagacccaggtttaatcccctgatccctatcacctttcatgaagtcttccctgagaatgaaagtctacatttacctctgacttttccaattttttttgactttgaaatccagcacttaattatacgctacatggtgttgttatgcctcagtggtcttctcattttttgagggcaaggtcggtgaattccatttttttctgtcttccccacagggctgaatgctcagtgtatcggtgatgattcatcgttgattgaaagaaagtaactcacttaggctgtaacttcgcttccttcacccagaggggcatggaaaggatgcggggggcggaggttgtcaggtatgtgtccatggagtaggaaggccatggaacctagcctatttgtctcccttgaaaaccttgacactccttaattaaagaggttggatttggagatggatacatatggaaatgaagcatatatgtgtcttattttgttaggttggaaaatgccacgggaaagctgtagatctgcatacagttatctcgatgatcaagagcagccagcagtcagaggtgactggccctctgtggttggtgttagcaaggaggataaagacactgtctgcttttagaaaaagcatttaggtgaatctcctggctgagtgctcctgtggggcttggataatgctgatgaatatgtgcattttgaaatgatcaggagtcagcctgataatccatcacatgtaaagatgcctttgggagcaactaaccctttctttgctcctgtgaagttcaaacccttatgagaaggggctcctaggcatcattaccacagggtttatcatcattatcagccttcatggttgccagcataggttcctgaaaagcctgcttacgtatggtacttagataaagctgtgtctaggacaagcctcactgctgccctcaatagtcttgtgatccaacccattccagtctatgcactaggagactgggtgaggtggtagaacaaagcatggcctctggaatctggaacctaggtctggatcctgactctgccacttagtagctgtctagtcttaagcaaattactcaccttctctgagtctccgattttcatctataaaaaggattgctaataatacctctttctcagtgttgttgtgaaatataatgtgatagccactattaaatatttttataagcaaattttaagtcccttcccttcctgtccaccattagtctctgtattagtccattttcatgctgctaataaagacatactcaagactgggttaatatgtcaggaaaaagaggtttaatggacccacagttccacatgaggaggcctcacaatcatggtggaaggcaaaaggcacgtcttatatgggagcaggcaagagagaaaatgagagccaactgaaaaggtttccacttataaaaccatcagatctcattcacttataaaatcatcagatcttattcactaccatgagaacagtatgggggaaaatgcccccatgattcagttatctcccactgggtctctcccacaacacatgagaattatgggagctgcaattcaagatgagatttgggtagggacgcagccaaaccatatcagtctccaaaggcaaacagtaacctagacaagggagggcatagatgtggcacacatgctgctcctctctcttccagtgcctgtggtaggcatcagtaatcaatcactgcactctactctgttctgctaagcttaaacgaggccccaaaatcttcaacatggtgttccaggctgcacaacctgctaggacctatacgagtgtctgcagagctctttcagttcatcccttcgtggtggcggaatctcagttgaacctaagctatgatcccagtaggatccagaatgttctatagactgttggggcaggcccactagggtctatttcccaggaaccaaggagcctcctggagaagaatttatcctaagagaagagagccaaagaagtaaggttcaaggtaatagtccatggtgcaggaggtggggatgtagaatctgccactcaggatgacctctgcctatccctaccggacagatgcctgagcccttttttagaggaagggctacaaaaaaattataaaggagtagtttctcaatagtggtcatagatagtgatggtctagcacagctgctgctttggggccagcaactgcttccactatgggagcagacatagtacgtccagcctagattcccatgccaggtgttggactcggcaagtggtgggcatgggcaggtgttgagcatgggcagcttcagcatacgcaccagagagcaccagccacagaaggacccttcgtggcacccccaatgcaccaggcattggcagataccctctgtggctgcttcttgtgctattggtggtgaccaaagatttcagtgcagtgaggcagaacaaatgagcgggctggtgtcaggtgctctgaatcctccacaagcacagtaagtcacccattgggagcccccagagcaacctgggagggaatttaaagtgtcaaagaatgggtaggaagcagccagagaaagattttaaaatagtattccttgagctccctctaatccagcccctggtggcctaggaaaccagagttagtatatgatcttgagccattttgcatcttatgtcatttttcaaatatttataagtcacctccggaatctctgaagtgagaagagtgtcttttgtacgctaatgagatgactggtggctggcagcccctagatggcttcagaatggggactggtcacagggaagtccctctggttaggattttcagccccatcccccaacctccatgaggggagaggagctgaaggttaaattgatcatcaatggccggtgatgtaatcattcatgcctgtgtaatgaaacttccatacaagcccaaaaggacagggttcaggaaacttccagagagctgaacatgtggaggctcctgaggggtggtctacccagaaaaggcatagaaagttcatgccccttcagccatacctctccctaagcatctcttccatctggctttgtaacatcctttataataaattgataaatgtaagtaaagtctttccctgagttctatgatcctctttagcaaattaatcaaacccaaggagggagtcatgggaacctggatttatagtaggttcgtcagaagcacaggcaaacagcctggggcttgtgactggtatctgaaatggggggcagtcttatgggatctggcactctctccaggtaatagtgtggcactgaattgaattagaggacacccagctggcgtctgctacagatggcttggtgtatggagaaatacctccacacatctggggtcacagaagtattctgtgctgtgttgtggtgagcagagaataggaaaaacacactttggtttctcctctatagctagaaggtatagaccctagaagcagtacgtggattttatgtctcattgtgtcctccatggtctctagtacaggctggtatgatggtagttcctcaaaaaagtttggtcaaaagaatgaattaacagaaggaaggagggacagatggataggtgggtaaatgaatggatggatggtgtgccaccctgcaagccagcattgatggtcctgtaatactgattactatttgcattttgtttcctccccaccctctctcttttccttccttcaaatattttttcttccttagttctcatcaaccccatctttggctccattgtgaggttcctttctcataatttcactctcttgagatcagaatgaaaagctgggtcaattttccattaattaattcattaattaattgagtcaataactgtttattgagctccagctgttcctttgtccattgatgcagtcacttgacaagatgcttattgagcaccggtggtgtgtctgatgtggtgccagaagctaactgatggggaaacacaaagatctaagcaagatccctgctctctggggtccaacatctaaatgacaaagtggacagaagccagcaaacactgagctctgctgacccgttgctcccatcctgatcagtagccccatcttcaggttgtgaaggtcaacccacctccaaaccccatgttgttttgcctcttgttctttgttaattggtctaacaggttgcctgcagtggccacataattaatatggcatttgcagagacaggcactctctgctcgctacctcccttcgccctgcttcttgcttcatcttcagtctcccctgctccttcctcatctgaatcctcagaatgcagaattagaagagatcttggggtgcttctggttatccagagcccagcatgggtgtcccatccacagcgtctcagaagctggtccctcaccgtggccctcacctccagcaacagcctgctctctctgcttcatgagcctcctgtcctgccccacgaaggcacgttcatatgttcagctcaagttgacccacgttgtctggactgcataagttagagcctggaataatcctgattcatcttttgagctgcagcctttcagattttagaattatggctattatgttccttttcaggattttcttgaggataaatatttccagtttctcagcttttccaaattcaaatttgacctctcacaatcctgaagatgtttctctggacagcctctagtttttctagagacccctcaaaatgtgccccattcccccaaactgactactacaaagagagctgcccagcaattgaggtcagctgggttattgcctggttttaagtgaccactctattcctacttgtgcaccctaagttttcattaactacgatttacatactgctagctcttattgaacttagagccaaataaaactaccaagtcttcttgacatgaataaaataaaatagcgttatatgttaaggttaaaataacccactaggattatctgctagtccaatctactaattttacaggaaaggaaactgaggcccagagagatcaagggactgtgaaaaggctcatagcttgtgtggagtagggcacagcggggactcctaactcctgatccagtgctctttctaaaacaccaggctgcctcctgattggcagccatttcgagggtaaatagaacgcgtcttctactttcatgtcagtctttctcatgcagtgctttatgctgttggatgttggaacccaacgcatgaccctgggtttagccctttgggatttcatcttattcatttcatgcaatctgtcgagataatttccagcctgattttgtgaggcattgctgtggcaggtcctcccaggcttgtgtcgggctgacgtatggaattttctccagctctggatgcttttcattctgtgccctgtgccagagtgttccaccgcaaacctggcagaggagacgcactgtctgaagccagacgcaccgcgcgcttccttctcccctcgcctgtctgcctggcggatgtcttccacgtgagtctctctcctcccacttgcctcctgccctgcttgttaggtaggagccccacaatccatcccaactgtaccaccagcgtggaacttaggggcaaatgtgccaagcagggttttgttttattttgtgaaatagcctttcttgagaatctacctgttgcagaaaaaaaaaaaaaatccctgaaccaagcatactcagacatgtttcctatccctttatggactcacattacgattctctccttagttttctcatctatataatgggaggagacagaaactcaggactagtaagcatctactctgtgctagcagctatgccaggggcttcatttacgtttgcctttacgtttacttttaactgtcaacacaagcctgcagatgatatccccatttcaaagaagagaaaactgacctcagagaagttaatttgccaaggcttatccagttagtaagtggcagagtttctttaccctctgccctcccttgctgagttactataaaaatcaaataatttagtaatgaatgtaaagcttctttgaaaagtgtaaagcactctgtaaacataagggagaattgttaaaatacttaggttcctcacttgctttgtctctccttcttcttttctgtcacctccctaaagtataagcagctgccttcggtccagacctatcaaagaaatgtcataaaactatttttcaaaatgtcaaatgcctgtgtactttagcccaaactaattatgccctttgattttctcgaagtcacaatgcaaaaccctgggagcttcgaggatgtgccctttctcctccatcctgaactaatggaaatcaaggctgaaggctgagcctgccggggagcccacaagagcccctcagtgccacagaggcctggcctgactttggcaggtctccagcagtgaccacagagtgctaaataataatagggttgaattatttatacagaggccaatgactcatgaggcatggtccacttctagaagagtgccagggtcccaagtctaaggtgagtggccaccagagggaggactgcagtcctggcctctagagcaccagtgcacacaccccccacccccccaccctgccatcatcccaccccatgtacagcaggcacagctctagcacagtgcctggagggcaactaacatttcagtgacattattgggtgtttacaccaagctagctatttgtgcatacaatttcccatttcatctctaaaacaatttttatttttcatatttttcctgataaagaaagtgaagcttatgtttcaggttatacagttggcaaagcatagagctggaacgagatccaggtctgacatttctaagataccatgtgctatttcttttagaattcctctttcctgacaattacatttaaaagcataatctgggaagtgcagatggtgccaggcccagtctcagggcacaatggattctttgtatggtctttagggccctttgtgatctgatctcattctggattcttcttatcagacacaatgtttttcatcatcagaatcacctggaagctttaaaatacagattgttggaatccatccttggtttactgtaatccaaataattggtactggaatcaattatttgtatttttaaggcttccaagtgattgtgatcatcagttggtttggaaactatcatgttatgtgcagaaagtcacttccaaattcccatccatattcccatttgtgtgactttgctcaattccatggacttcacttaaattggcttttttctactcccacccattgttctcatccagctcacactccatcacctctgtaaggatcttggctcccagagcttccagaaatgctccatcatctgtattccattaacacctttggctctaaactgatatatattagtcaggatgtgagtttagaagctgtccgagagacccaaaatagcagttttgcctcatttaacacctataaatacatccctgtcttctctcacggtacagaataatcagtccatcagggacccaggctcctgcaatcttgtcgctcatccctagcgtggtgcctttgttctcatagcccaaaacggctcatcaccatgcccataaccagacactggaaaaagggaaaatggagtaaggaagagcaacgacaaagaattgcacacaacaattaggatcaccttccactgtccagaacttgatcacatagccacccttagctgcaaccaaggttgagagatttaactttattttgcatcactacatgcctagtaaaaatggagggttctgttaattgtgctactggttggggagaatgggtattggggaacaacctagcaggcttaacttctacttgggattgtaattttctctttgtgtctgtgtttccagctagactataaaagctctgtgagaactaggcccctgacttacacctgtttgtgatccttctaggaaggcactagatcagtaccactggttggcaagatagactagagtgattgacaaagctctggaatttaacttttattttagtccttgttttctacaatttagcacaagtttcttaacctctctgggctttagtttcatagaatcataaaatttagttgaaagtcaccttcgatattatctagtgccatcctctcattttgtagatgaggaagctgaaaaccagaaagaatagtgacctgtccaggacacaaagctttataaatagaagagccagagaccaggtctcctagaaaccaacccaaggacagcactaaggtgtcttcccatatccagaaaataagtacaagggacaatgttatctttaagcttccttccaattcagaaactctgagccacatatgcagtcacatttgtaccccttgctcaaattaagtataaaagtgggataatttccaagcactcaaccactgcatcctgctggatcttgctatgtacttcagcaggttagatggacactcaagaggttcagttcagtgctttgggttccagggtcatctaagaagtaaactgggtggagaaagcaaagaagagatacttgggtgaccccactctctggtcacaagcagtaatattccctgtgagcttcttaggagatgacacagctccaggtgttgtggagcagctgccctcagggaatttggaatccaggtcacacacagttaaatagcagtagaggagggcgtatgtaacattaaacagaagaaacgtcacaaggcaaactggctgtaataataataacagcttcaatttattgctcaactgcaatgtgtgccccacactgtgataggtgtttgttttataggcttgatctcattaaatcctcacgacaagcctctgggattactgaaggtcatacagctggtaagtggtgattaattgtcagaggagtggtgtgaagaacataaattatggcgcagttcagaaagagagaagcctgaggatggagtggtctgggaaagctctgtgaaggaggagagttaaacaggattctgagggtaggtgggatgtgaaggaggtgagaaagagggaaagtgagtgtagatggcaaaggcaacacaggtacaggggacactgagttaaaaaattcccaagtaaagcatgagagtaattaaatccaagggcaaacatccaagctgtggaattgtggggctagggagtggtgggggcaatgaaacacccaatgatcattcttggaaaagggataaaaggtcaactgaagtcccatagctcacatgtggcctgctacaaaagaaaagaggaaagaaaatgactgaaaaactctaaaggcaattgtgtcaagtgacttacaaaaaaaaaagtatcttttcatccagtaatctctcttctagggtttaaactaacaaaaatttcagagacagagtgaaaactgaaaacaaatgtctaaataataggagaattcttgaatatattatcacacatatacatggtcaaatgttatgtagcttttacagaacgtacttttgaaaaatgtgtaatgatgtcacataatgtcaagaagcagaatgtggtccaggcgcagtgagtggttcacacctgtaatcccagcactttgggaggccaaagaaggtggatcacctgagcccaggagtttgagaccagcctgggcaacgtggtgaagacctgtctctacaaaaaacaaacaaacaaaaaaccccacagaaattagccagtgtgatggtatatgcctgtagtcccagtacttgagaggctgaactggaggatcgcttgatcctgggaggttgaggctggggtaagtcgtgatcacaccactgcactccagcctgggtgacagagggagtccctgtctcaaaaacgaaacaaaacaaccctcccccaaccaaaacaaaacaaagaagcagaatgcaaaaaagtatagtaccacagttcgtcattttaaattatatgtatgtatatattatgtaaaatcatatgtgagtatacacacacagaaaaaaagactgaaggaaagacagcatatttaccatggttatcatcacagagtaagaatgtgggtaagttttgctttagagttttccttttctatatttactaagttatgttcagtgagcacacacttttatagtaataaaaatgttcatttaaaattttttaaatttaaaatgctcatcctctgccataaagcaatatttataaacctcttgctttgtcttcaaagaaaattcattgtctctgccttcagtatgcagacacaaatattccaaccaaatgattattcagtaattgctgaatccatagatttttttgaaagttcatttaaactgggttttcctgggttcccatgtaacgctcccagctccatggctcccaagggactggaaacattaaagtctcccattaatgttctctggagccatttagataaattgtcttccccagagctataaatcctaaatgaatgacacccttatttcaggggacaggtaccaaagcctctttcaaacttgatgatttatgtatctgtggcttgcagaatgtcaggggtccttcatcaatatccacagggccttcccaggtataggaacataccacatctgatggaaagacattactgtacttgggtcaatagctttcacctttatccgtcctgcttgctttgcgttgggggtttatttatttttctttcttccactgaaatagctgggatatgagctgagtaagagaggcagtgcattaaatataacttgatcagaatcccaggctgtctttgccctcactgcaataggggcaacataaaggttaataactgagagaggcccccacgcacttaaccacagtgcagcaccccatcaccaagtgacaattaggaactctccatgaatgccaatgactggtgatcaaacagagcttcacccaaaccaggcgcacttttgcattagctcagctctccattcatcactgagctgacagcttgcagagctcaatgttgagtatgcggctctgtctttgttttacccagtgaaatgatctatgctaccaggactgagtgggagaggagcaggggagggaacgagggaaatgaaataggcttgtctttggcatggttgggcaacagctcaaagtgtctgtttgagacttgaagagaaatatcgcataatgatcttgcttgttcctgctttcaactttttggctctcagacaaggatggtcctaccttaaatagttctctttttggaggcagcatgacaaattggagcaagcacatagccagctgtgtgattttgggcaagtcactctgggtcttagttttctcatccatagaatgaaggagtggataagaacagtgattttcaaaccaggttcctcagagtgttagggttcataggggcacctcagaccctgcaagggcatgcttcctgcaagggcagaggtgaggaggttagtaaattccaggcacagctgctccatgttggctcattgaattttattagtagactactttatttttcttttattatactttaagttctagggtacatgcgcagaacgtgcaggtttgtcacataggtttacacgtgccatggtggtttgctgcacccctcaacccatcatttacattaggtatttctcctaatgctatccctcccatagcccccaatcccccgacaggccctagtgtgtgatgttcccatccccgtgtccatgtgttctcattgttcaactcccacttatgagtgagcacatgcggcgtttggttttctgatcttgtgatagtttgctgagaatgatggtttccagcttcatccatgtccctgcaaaggacatgaactcatcctttttgatggttgcatagtattccatggtgtatatgtgtcacattttgtgcagaacatggtcttacattctaatttcatttggtcctcacaatttgtaaggtaattaggacagatatgaccaactattccagtaactattgctgtgttaaaaccacctcaagactctatggcacaagacaaccattttattatgttcacggattctttgactccggaatttgggtgggcacaacacgaaatgctcttctctgttccataatgtctgagacctcagctggaaagaccaaaggctggtagtgactaaacagccgggggctagattcatctggatgtgtccttactcacgtcagctgagctattgactggaacactgacacacagcctttctctggggttgtcacatgggctagtttgggcttcttcacacaatggcagctgaactccaagggctaatgtcccaagaacaaggcagaattgcactttatttttatcatctgaactcagaagttacatattgttgcttctgccatgccctgttggttgaggcagtcccaaaatttcacccaggatcaaaggagggacaagatgggagaagaatcaatgtcacagtggaggaagagcatgtagaacgggagatagtgttattatcttgagaatatacaatctgccaagccctcttcatgtgaaagatgaggaaacagacaggggagaattcatacacatttagtaagagcagagctgggactagagccagttacttcagatttgagccctctctttgccatgctgctttgggttcctcatttcatctttctgagttaactctttattaattcagtggatagactccttaaaatatgaatcctcatcatggcgatgcatgaccagcccaggagagctgtatcttcttgtggatggaacacttttctcatctgttctcagaaaattggagtgaaaaatgtacataaattccattaaaattaaggtaaaaggcaaggctattcatgtctctttctagcttccagtccagcatcaggaatataattggtacttagtaaaggattgagctctttgtgtgtgtttttgttttttatgtatcaacatttgcttttaaatcctttccaaattcaaagccatataaacaattctttaaggttgttttgactctttgatggttcctacttggagtttacttttatcttcatccattctgacaacacctaagtgtatttatttccaatttaccaacatgaaaaatgaaagccgagagacaaaaagagagccaaggacacaaggtaaagtctgagaaaagagttggaatttgaaggaagttatgaagtaggattttttgttattgattcagtagccatcagctgggaagtgtcaatgcccagtcatacgttcagcacagaatccaaaggcaaggtgacaatggtccttgccatggagagcctcacagtctaggagagtagtctaggttatccaatataatcgttgctgaaagagggcctgaacaaagcactgatagaacacagaggaagcagctgtgggcactggctgggagtttgggtgcttcacagaggtgataatgtttaacctggacctggagggagaggtaagagctgtccaggcagagggagcgaggtgggacaataatcctgagcatagggaatacacatggggagacacagaaacatgaaagggcatgatgtgtactgagaaagatagacatctggtcagtgtgggagggtagatgtgaagggtgggcagacaagtagggaagcagtctggaaaattgaggtcagatcataaaggagtgccagtagcatccctagatactccctttctgtgaactttatctttctcatagtcccaccttacccctgcttctgagatcttgctctctacctcttcacaattaaaacctgctctggagagtgttggatatcagtcatttacactatagtataaatgacattatatatagactataagccaatgtgttatttcttggaacatttttttaattagaaattttatttcagtttattaaacaaaaggctatgtctttcttgtttgaagggatgttgtggagattcttcttatggccagtaaaatcccagcccagagtgagagtcttgtagggaaacatccaccactctgtaccagagacagaatcctgggccaaactaatcatatgtccaactcaatgtacctgcatcatccccagtcattttgagctctcttggtctctggataagaacttaactatcccaagagctgctaaccacttttcccaataaaatataatacatgccccataatgatcaacctgcagaactcttatccttcatatcagcaagccaaactccttggcatggggcagaatgtaaacgttaacaatctcatagctcactgcctataaaaactctttaatgtgtgtctaagtaacaggtgattgtccactgcctacagctagagtgataattccagctcctctttcctgaaagagatgagtattgattgtctatgtgagaacatgtgggttacagtgatgtttggggaaagccagatcttactaacatatggacacagttcatttacagttctgcaagggagggagaagaacgtttccttagggttttctttcctttttttttttagagacagggtctcactctgtcacccaggctggagtttagtggcatgatcatggctcactgcacttggctcctaggctgaatcaatcgtcccaccttactctcccaaagagctgggactacaggtgtgtaccaccatgcctggtcctcctttcattgttgattggtgttaggtactgcctgatctcttaacttataagtgccattctcatctcccacttgctgccatccttgaagtctacttgacttggtattagaaggcacttggctgattgttaaactccattctcactgatttttctcaattactcctttaacctcttctttctgccatctctcaggtccatccccatagatggcctcttgacttgtctcacctcctaagctctggtttcctgatctcccactgcattaatggactttgttccacgccttactgtcctctgtggttgccaaggctactttgtttcctcctgtatacaactctatccaatccctcctccagtattactaccccggaggattgacattgagtcagttgtgctgtggctgtcacttctgttccttggacatggtccctacaccaggaaagaggttcttgtcttgttcccctgtgtgctgagcctctgcctgtgccatggtccaagttgccagatctatatctcctccttttgcttgaacccctgccctgcctgattcctttctaagtgttcctgctgtatcctttagaatagagactccgtcttgtcctcactgtgaaaactgtgttcccagggactggagtcttgtgggagccccagtccttggagtccaagactccctgctatcatgctcagctaatgccaagttatggctgctaggaccacctttgacttccaatctgggctctgatcccttgcctgtccatctcatctctggtcactggagtttgtttccttgcatggacttcctgctgccatctgttgctgggtctgaccagaaatctgccatgtctcactggttaatgccagaataggccaactgctctgacaaacaatcccacgtctcagtagcttaacacagtaacaggtttatttctcatatcagtccaagagttcgacaatctactacaagatgattcgtggacatgctccttccatccagtgggccctccatcttctaagaccctggaatccttaactggttcctttgtatccagccagccagtggatgagagaggcaagacagcaaaggagatatcaggagattttttaggggctgaccaagaagtggtattcattgctctgacttcatcatcactggttaaaactagtacctaacctaacctagaaaatgaagtcttcctgagtgccaggggaaaatgaaaaaatctggtgtacaagtagcattttctctgctacgcagtggaacatctgttttctaagtgctatctctttccaacccagcctatttctccccctccagcttatcattcagtccaaagtctggaaatgactggactcctgagaagaaatttcagaagtcacggaaaatggggaccagggtttttgccttcctaccacctgagcagaaggtggatcccagggggaagcccccctagggagaacctccagccctacataatcttgcaaactgggatctttttgataagtggcagcctttcatttcttccaagaaatattctttttcctctcccggggacttgttcagagaagagatactcaagtgataggtgctttgcaaatatctagatggagggggaaaatggcatgagaaaaaatttagacaaaacaatgtagatcaccatggaaacaatctttagaacacactgaggaaaagaaatcattgttaacatggttcatattttgcagagatatccaatcaccaaattcaattttagacctttcaatcacgctgccttcaaaatgccagggttgttatgaccacagaacatgctgattttctgggatccctcctcttactcatctaataacctttaatgaagatacagctttaattaaggcaacttactgtttccctgttgtttaatttgaaatcagtgaaaggtcaagttaccattaacacagtgagtttactaagctattttagaagtatttttattctgacagcagaagcttataagaatatggcaaaaatatttagttgaaatgtgaacaaggaaaataggaggtttgtcttttgcatggcatggtaagaaaaagagaaaccattcttagttactcaaaagcagtttttcttagaattttctgccctaatatacgtgaaaaagtctacaggtatggatgactgttggtcaataataatgcttcaatatggccatttaaataaaacctttgggtgttgctaatgaacagtttgttctgggggcttctaaagaaatttcagaagaaaagcagtggcttttgcaagtgagatctcagagacagagggtcaccaccatctaggtgctgggcttccaccttgcaggcacagaaatgtagtgtttgcccatggttatctgcccaccagtctcatggggcttcatccctgttcattctccaggttcccagtctttctggggaaaagtttctctctctctctctctctcgttacacactttaaaagcaaggatgtctttctcattggaaggcaaggccagagttttattggatagtcccaggatagaaagttacaaactatgcattctgaggccttttggaaaatttatatgtatagtgtatatgttagagacagggtctcactttgtcacctaggttggagtgcagtggcacaatcatagctcactgcagccttgaactcctgtgatcctcccacctcagcctcctcagtagctggaactgcatgtatgaaccaccaccctcggcttggaaaatggatttgtgctctgttctctattttccttggccttagtcttctcagtacatgatatgtgtgggctgagggagaaaagagccagtgtgcttatgtgaaataggaggcaagtcttgatacaactatgagctctatttcttcctttctctcatttcttcctacaaatatttgatgagcgcgtacgacgtattaggtattctctctggtgccactagtagttcttttgtgtgcatcttttccctctctgtagcttttcttcttcctactttaggtatcatatttctttctgtcctccacttccctgtgacctcaaaacctattctcaggaataggttgagctgtgagttgtttgcactttggtgcaaatgtaagttgctttaatttaatcttccgttgttgtatcaaatgattccctgttcaagaaattttagacatcagtttgcaagcaggggagatattttcaaagtagaagcccttctccaaaacctcagagtcacaccatctgttgaccacctacttggaatatgcaagagatgggtcctttccttggctttcatgtataatcagaacagataatggaattgaccaacctcagaaaaacatgccaacattgctattaggataaagtcccaaagccttttccatagcacacaagaccctgcataatcctgcctcctacctaactctttagactctttctttatcattggaggaaagccacattggaattttgtcagatctttgatcaaaataccatctaatcttagcatgcttctgcttggagtgttctgcttgtcaacctccttcaccgtgctaactcctactcctgcttcacgtctcatcttggatgttacttcttctgacaagcattcactgactctcagggacttaatgagactgggattaggccccctgatatatgatctgatagcatcataattttattattttttctttttttaaaaaattatactttaagttctgggatacatgtgcagaacgtgcaggtttgttacacaggtatacacgtgccatggtggtttgctgcatccatcaacccatcatttacatcaacattagatatttctcctaatgctatccctcccctagccccccactccccgacaggccctggtgtgtgatgttcccctccctgtgtccatgtgttctcattgttcaactcccacttatgagtgagaacctgcggtgtttagttttctgttcttgcgttagtttgctgagaatgatggcttccagcttcactcatgtctctgccaaggacatgaactcatcctttttaatggctacatagtattccatggtgtatatgtgccacattttctttatccagtctatcactgatgggcatttgagcacaagtaattttcatagcacttctcatagttgtgcttagttatttatttcacagaagtatacttcattaattttagtcttcacactgtcttgtctattattttgtatcaaacatctatcagagtgctgggctcatagtaaatatctgtggaatgtatacataaccaatcttaaatactaaatctcaaagtcaaaacttcatcaagagtccccttgcagtttggtaataagctgattagctctgccttgctgagtggtcacctactgtgaaggtaattccatcttggacagaatctgtacttgggttgtgccctcattgtctcatgtctaggatttccccacttcagctcatgagatcataccagaataatcttcccctaaactctggtttgaccaggtcattcttctgctcaaaagcctctgatggattggagttggctacagaataaagttcagactctacagaataaagttcagactccacctggccttctttaagcccttttgtatgttgatcctgacctctatttctatattaacttcctttctgagatgaattgttccttccaccagacatttttactcactgactttaagcttttgtttacattattttctctatccagaagcacctcctatccttctgtttataaaactcatattccatcttctaagagaacaactcatattctgagagaacaactcatattccatcttctctgtgcaatagtctcaggccactagtgttaggactctttcaggtgcaagtggtgagactgatctcaaattgctctaagtaaaaaagagaacttactcttaatacatgcaaggtactgtgtatttcgaattttcctttagtctgcatgagttctcccccaccccccgcaaaggaaaatggagatattttacctattcctgtgataacagtatctcagttttcctttgtggaaccacccacgtctcacgctccattcatgcagttccatgaggctgacctcacccatgggctccaggagtggaagttttttctatctctgggggaagtcctctctccatctgcttccttcttcctacagcttctggcaagatctgtagcttatacttgcattcttacacgtaggagtcatccaataagtatttgttcattatatttcagaatggggggttgagggaagggtggaagactcagattttctctgggattgtgtagttcaaaaacttaaatttgccctcactgctaaaggaaatcgaaggtcaacacgtctgtgttatggcatttgaatcatggagatccaaatgtatctcaaatatattttcttagctataagttatctcctggtcaatttggaaatcattcaactctttgtatgtatggcccatctatatggctcttatatatgtaaaatgaagttatacaggcaatgtacataactcagccagctggtctcctttttatggggattttgctcatttttaatttaataaagaaatcattctttcactgaattttaattcacgatgataagacttcagaaatatagtattatattcagaaagaatttcagtcttcttgctgtcaaacacctcttgctctcacatgggcactttaatgttgtcaggatgtaaattctattttgacagagtccttatagatggaattttcaactttttattcttagctaatatggatgggtaagaggatgtttgagttttctcttctgttttcataaaaacatactttcccacaagactagatgaaaacagtctggttgtgaagcattctaaggtttggagagacaaagttttctctgctcctcaagacctactgttaactatctccaaatggctctgcggttattgttatctctaattgctgtgatgctttggagagtctgaaggcactggaatcgttgtttccaccaagaaatggtttcttctacttacttttggtgcagttccagttgagtttccgatgtaaagagttatggctacagagccattgtcctttgctctttacataatgttagggcctgatgattagaaggatgtaagtttttacctcttttgtccaggaataagagtagactgaactacactcaacacttgtattagctatctattgctatgtaaaaagtgatcccaacatgaagtagcttcataataaacgtgttcaacaataaacatgtattatctcacacattttctgtgtggaatctgggagaggtttagctgggtggttctggctcaggatgtctcatgaagttatgtcaaggtgttggcctggggcagtagtcatctgaaggctttgctggggctggactggggttttcaaggtggctcattcacatgggtattggctgcaagcctaagtttcttgcttatggagacccctgcttgaaggcatggcagctggcttcctccagaatgagtgatcaaagagagacaccaaggaagaagctgcaatgcctcttatggccttgtctcaaaagcagtcactttgtccatattctactcgctagaagtgagtcactaggtgtagcccatactcagggtgaggggaattgaggcctactttttgagagatggtatatcaaataatttggggacatatttttaaactgccactgttcttttatttccctcctttatgattggctaggtgcaaaacacatacagatgaacaaaccaatcaaggtcaggggtttagtctggagtcagcaaatggacagataagtactgttccctcagtcttggggtaatttacagagaatttcatgcttccaacctaacaaaataggtggtccccaaagctctaaaaagatgaagtggaaattcggtctgagagagccagattttcaaacaatactggcttctgtgcccttgtgaatatgcagtggccaggaggtagctttactcggggagtgctcagagaatgggacaccaggaaggcttctgaacagggatagaactgcttggctgtgctcacttagactaataggtcagaatgcaggcagcagatggtaagacctgagtaagaagctagctagttctgttctgcaggttggcaaaggccagtcacagatggtgacagtgaggctacaagtagatcccagttctgggatcaagcaagtgccaaagcctcacactaaaattatctgcagcactgctgagagacgtgcaggatccacaggcagaattctaggcttggatagctaaaacagagaccatagtggttctggccccttggtggctctaagtgcaaaacatgaggaagggagcacttggtaccagatggagaggttgcgggaacagagcatgactgtcagaccacagagtgaaacatcgcaccataaagacagatggcgagaggggtgcccccctccgtggcagctcactgccttttgagtactcttactgcctgtgtacccttcaaatgggcctctccaaaagcttctacttccaaagcatttttatctagaagtcaaatgtaagtgtttcaagcttgattccaggctgagagcacttcatagcttttctattttctcacatttagagactaccaggtttctgatgcactaattaacaagggaatcatagaatggtgtaatttatgaaattgagcattggagaaaaggatagagtctttccagtacattcttgctattaagatactcgtgcaaaggcagagggtgtgggaaacagaaaatgcacatatttatacttcaaggtatagatcaactctacatgtcattaccctaccaagaaattcagtggctctgctgctaccacctttagatgcagacaggcagggcttccctttaaaggctctgctctggctcttccccagctgtgctcctacatctgaggagtccattaagccaagaaatgtgtccacctggaggtgactgtaccccttcagacctcacatcaggtacccaggagccagtattccctgcccaaatggctctgagccacttccagagcctgcataggcttctcccctagatcctgagatatgcacccctggacctgtggaatagccaagaaatgactgttttggaggggagaaagtgaagacagagcttggacatgtgggctagtgcgttcatggagtggagggtacctggcactgtagggctgaaggggccatgggaagcaaagggtaaaggctgctccatgtggggagcagttctctctgacctgccttgttccagcaaggagctctgagaagtctcagaattctcaattcaaactgggtcttccaagttgttatgaaagtacatttgtcaaggtgaaaggatataatgcttttagtactccatttgttagctttttaactttcacatatttagacatttggtatgtgggtctccatgtgtagccttctcatggtccctacaaatattaaaattggtcccggctccccatttaatatggaatccaagtcaaatcggcttggcctgatttttaaggccttttactatttgatttttctctaatcttacctcccgctactctctgcaggaatcttctatctgtcaaacctgtcgacctacagcccaggctcagcccacatccttttctctgtgctcaggttcacattatttttctcctctgaaaggcctccgtttctgccttggatttatatggccaacgtagtgtttcattatgacccagctcaagcctcacagccatgtctcctcctctggactcttctaacagcttttgtctcagccacttattggcactcaaagtgtgcaactgtgtgtggccatttttcatattatgcacaaggtgtggctataagataaggagacataaatatgcaagttttcaaaccaggacaagggacagggaaaaaaaaaaaaaaaagaagagttgccaaagaatcaggagaatgtagttaggcagctactaagggaagagatgtcagcattgtcaataagctgagagaggtcatgagaaagataccccaaaatagaccattattctagaaggtaagaggtcttttgtaaccattgaaagaatagcagattgtgtgagcaaaagcaacgctgtagtgggaaaaataagagatgagaaagtggagacaacaagtatacttttatttatttatttagagacagggcctcaatctgtggcccaggctggagtgcagtggcttggtcacagtacactgcagcctcaacctcccacactcaagcgatcatcccatctcagcaccccgcctcccccaccgcgaatagctgggactataggtgtgtgccaccacacccggctagttttttattttttgcatataggggagccttattatgttcccagactggtttcaaactcctggcctcaagcaatcctcccaccttggcatcccaaggtgctgggattacaggcatgagccacagtgctcagcagcaaatataatgtttcccaagaagtgtgattcctaggagaaaggagaaggtagtttgggtggaagagattgggtggctttgttctgttcaaaggatgggcgagactatgtttgtgggagaaagatttaggttagaggaagaaattaataatggggaaagaaagaatagctgaataaaatctgggaatggctgggatccagggcacaggtgcaagatttaaccttgaggagaaagggcacttcttgctgtgggtgagggagtgaagagggtaagatgaatgaaggtacaggataggcataataatgaagagcctggatttaagggtgaagccactggctcacattatagaggaaaggctaggaaagccgaattttctggggccaggtccagatttaatatatttaagtataacagtcttaattcattcctttcaccttattcagtgccctgggtgtgccaaatactactgggcactggggtctacaaaggtacgacttttcatgtaatgttggaatttgttatgttggtaactcgagatttgcatatatttaacagtcttaattcattcctttcacattattcagtgccctgggtgtgccaaatactactgggcactggggtctataaaggtacgacttttcattaattttggaatttgttatgttggtaactcgagatttgcttttcattcttctggaaggctgtatgtagaaataaatacagtcatcagacgagttctttgtcagaccagatgtcctgggttggggtttggaaaacatgggcatcttaacaatggtgccctgtttgaggtggagagggaggagaggcccaaatcggggaaaggaattaaatggaggtttagacgcgggtaaccggagtgggtgggccttcaacctggaagatgggaatccccagcgcacttcgggcagcgctgtaaccaagggtaaccgcacctcggtttacaccggtgtgaagaccagcctcttccccaaaccaggtgtatctacggcggcctagcaggaccacacacaagccaagcacgtcacgtcattcgagctaccttaccgcgaaagtccactgcctcctactacttctggtcactactacctttgctcacagtttattaaggaggagcggagaagaagaggggcggagaaggggcggggagaatcacctttccttttttacaattggtcgtagtagactccgagtcctgccgcccgtcctgcagccgacaggctgccaggactgtcactcgaggagctgccgctaccgccccccgccgtggccccgccccttgccgtggctgggatctcgcgggaagagctgcgggcacggcggtggctcggtctcccggctgcgcgcggagcgggagggctctcctcacacaagcgcttccttgccgagaggctggagctgcggcaccgcaggcctgagccaccccttctctgctgtctccttctcttcctcagggctcccgtgtctgctcgccctccgacgctgctcaggttagaaagcccggagcgcgtctccgctgaggagcggtcggggagcggggacacggagcagccggagcaggcgggctcctgacgggggcggctctgggggctgcgcggcgctgcctggtgggcgcgaggcttggcggggtttgggagtccggggggcgaggaggcggtgcagtgggatccgggcgcgggcgcccaagggcggtgtagcgggtgccggagctcccgaggtgagggggcaatgtattagggatcctgggggctcttccggcttggggtaggggtgggtggcggcacacggggtcctaggtctttgacgtcgagggagatttatcagggtcttgagcttcttggaggtggtgtagcggggttccgggacaaggggtctttttacccgggtcccgagctctttggggcagagaatgcagtttagcaaggtttacaccggtgtaaaccttgtctctggaggcagatcatcggggtcttgggggttctttgagcgggcgtgggcgtccgtttcgcattgctgggatgaagaagcagtgtgtccgggttctggggagaggggtctgttcatcggtgtctccgggtgagagagcgatgtatccgttccgctggggccggggccgccttggggggttgttgggggctgagggtgtgtagcggcgaccagcgtctggccggggtttctgctttgcccggagcggggcggtaacttggcatggtctccagtcttttgggggcgacggggcgagttagctggcccccgggcagtctctcggggtgggcgcggctccgcaggcgctgggtccgctgagggcgggagagggctttggtgctaccgcgcaggctgggcagcatcctgaaacgtttttgttcaggtctccttctctctggatgagatttactcaatgcttagttggaggattgatcggtgttgttgcctagttgaagaagcagtgcgtttgttctgcagttttcttttctctgccccgggatccctgtgggggcgcgctggtctcgctggagctccgggagctagagtggcagcaccttaggtgggcgtttggtctgcaggttctttaggaggccggtgtccgcaggttgagcgtggatacagctcctgagcaactggaatctgttgagggtggggaagactgattttggcttgctttcctaggtggtggtctgctttgctcatcctgcatgattagatctgttctgaagtcttgcctgagtgaatgttaggcagagtcggatagtgcagggaagcgtgttctgtctggcttctttctgtcctttgaaaagcatttgtagagagggataacgtcaaattcagcctccagaaaacaatggaatttgaaatcccaaagctagaactctgcaaaaacgttttctgtgacctgtaaggatggttaatcgagcttttttagagaattctgcttaacagtttcattgtattgtaaaagtgtatttagccttggatattacagaggttttggtaactagcgtaggcgtaggtgggatttaaataaaatgacttgtatgtatgtgtattggttaaaaaaaaaaacagcgtataggtgagaaagcctatgtgtttgcctgacatttcttttggttagttactctatcacagaggcctgtatatgaaagttaatgtggcaggcagtgaagtccgtactcagagctgttctgtaaatatgtaatctggggttaacagacaaatttgagtataccaaagcaaataattttgcctgccttagtctttttcttcgtgtcagttttttttttttcttgttttttggtttgtttcttttgaaacagggacttattccgccttccaggctaggttgtagcatcgctaccatggctcactgcagcctcgacctccaaagctcaagcagccctcccagttcagcttcccatccccacccccagtagaggagctggaactacatgcatgtgccaccacgcctcactaattttatttatttatttattcaattaattaaagacaaggtcttgcgctgttgcccagtctggtcttgaactcctggcctcaagtgatccttcagcctcagcttcccaaagtactgggatttagaggcgtgagtcaccatgccaggcctcttagatacaattttttttaaaagatgtcattttttctgatcttagaaccagacagattagggataatgtacttaattttggaattttacatcattttgaaaaacaaaggaatcccgcacagcaatatttaagactttgaagggtttaaaataagttttgttgttgttgttattcagaccaaaatacctggttgacatttacagctatcacaactgattgcttgagcagatatttggttggaatgacagcccccaaacctgtaagcagatcttatttttcctttttttgagagaaagacaaagaacaaattaagcaggtttcagaaacttttttttttctaaaaagcagctttcatcatttctaagtaaggcatagactgataagtcaacacatatttgattatctgctaggtgtcacagcgctggatgtacactgattaaagctgtcatgtgactttcccctttaagtccagagagaggaagaaaacaaataaatacagttaaaaattgtgatactgctaaggaagaaatacacaaggtacttaagattcagctctctttttttagtaacccctgaatgatgatacgattgatgtgtgttgtgataataagaaaccaagcaaaatagttaactgccttctgaattagtaaagaaagattaaattacaatcagtagagttttaggtgttaaatgtatgttgactctttgtagatgattgtgctacgtaagcatacaaaagcctataaggatacacatcagacttaaccatgtttggattcttcaggagggagttgcagaggcatagaagagagcggtttaattttatagttttatattacttgaatctatttcaatgagcagacattacttttaagtacaagttagagaaaccctaaaattaaaacatttcagtcactatgcaaatggtgaaatgtacagtatttataaggcttttgtcagtattgccagttgtacccgtgtatactaatgaaggaaaagggtatttcaagtatctgaaaattataagggtgtgcagggtggggtgggtagcacaacaaaataagaaaagacacagacctaagtaaaatgttaaaacatgttaagtttgttggatatttaattatgtaaagataaattaattttaggactttcttttatcaaatttaattgtttcctgagtttgcaaaaggaagtttttagatttcctagaggagaatagggtgggggaataggtattcttattgtggtacagacttcaggaaatttctttttgtcaaacatatacacatctgatagatatattttgcttgtgaagcatacgaaccatacaaataattttatagtttcattattacactgctgaaaatgacagtaccaaagtgtcttttgaattatcattcagagttctagaatcataaatatgatatactaaagcagtttctagaaaggaaatcataagacatgaattccagtcttcactgtgctactcatggtgtgtccttggataattccttaatctttcagggccccagttttcatatatacatatatgaattatacttacatacattttatatataatatatacttttgctttaatatatacatatatgacatgtgtatgttgttatatacatatgccatatatgtatataatatgtataatatataaaatatgtgtataaaaagatacatatacacacacttagagtttttgtgttgcaagtctgaagtattgtatgtacaaaaaggaagagataccttaagagtagctagttctcaagaaacaactagttccatgtaatttttacatattatacctaattttagaagcctcttctttttaaaggtacatggcaagtatttaattccagaatatagattcatgaaggtgagtgattttctttagataatttagctttatctgttaaagcattattatttttagttccaatccctggttctgtagtagattatctatataataatatgtccttacttaactctggatatagaatgaggtctctagtggttgcctccagacttgatcccctttaatccatccttacattactgccaaggtgatttttctgaagtgcaaatctattcattgcttcttttcttgtttcttttctcttttctttctctttctttcttagaaatgttactgagatttatttatttatctttcaacttttcttttaagttcaggggcacatgtgcagaatgggcaggtttgtgacacaggtaaacatgtgccatagtgatttactgcacagatcatcccatcacccaggtataaagcccagcatccactagctattcttctcttcctgatgctgtctctccctgcccttctttcttaaagcccatactttatcagcccaactctctatcgttacaaggcctttcatcatctgactaatcttatgcatttcccccaccataaatctaaagctgcacttgtactaatacgagcagtttactgaatgagccatactgtttcctgactcagagccttcacatatgttctctccactatttaggatgtctttccttctcttgtcttgctggcaaagtctactgattttttaagatacaacgtaagcactgtctgctttttttttttttttttttttagctcttttttagttaccattttttcttttttttctttctttactgtctgctttttaagtcttctggtcttccctcttcccaaccctaggtgttatatactcactgtatcatgttcattcattctcttgtgtttactaatgtgttgtaattaagtctctctttcctcctggactcaaaggcaggtttatatttgtcttattactttttgacttcctgttgcttgtttatgcatagttggctatcattacatgtttgaactctcagtaccaagattgatgtgttcatgatgtcagaagtgagttaaactcaaatctcagtcttatcctgttttcctaaaatttgggagtttctaaagtatcttattctcttgccctgtgaccataagctgatatgagaatggtagttcttagctttgtgtttaagaaataagacttctcgcactttaagaggtgatggttacactgttaaacttgcagaaaagtcttgtagaattttgaggcaactactaatccttatctctaaaattgctagaagagatattaactagtttgggtgttttaaatcttggacatcattatttggtagatattttaccttggctgctttttacttggaaaatgatagtagctgatgtatgcaggtttttatataggctttaataattgctttacatacattgccattcattttcaaaataaatcctaaacatttaataatttgctcagcgtcattatctactaagatgcagactatgactacatgtaggtctgactgtctccagactctatgctttttctaatactacactgttttctgaatatgactgcttattcagtgtttaaaattattaacatatttaattcattttgtaaattgaagaagtaggttgtaaagtttatccattcagttcttccaaaaaagctaaagtagacaatttgagattgattggactttagagaccatttaatccaactccttcctttagcatatgaggaagcacacatgcaagagtggtggaatggggtgctgaagatcacacagttagttggtctataagattttctttgttaagctggttgtgaacactggtgttataaaactattactcgaggccaggcgcggtggcttacgcctctaatcccagcactttgggaggccgaggcgggcggattacctgaagtcaggagttcaagaccagcctggctaacatggtgaaaccccgtctctactaaaaatacaaaaattagccgggcgtggtggcacacgcctgtaatcccagctattcgggaggctgaggcaggaaaattgcttgagcctgggagacggaggttgcagtgagccgagattgtccagcctggccgacagacctagactctgtctcaaaaaaaaaaaaaaaaaaaaaaaaaggccgggtgcgatggctcacacttgtgatcccagcactttgggaggctgaagcaggtggatcacttgagttcaggagttcgagaccagcctggccaacatggtgaaaccccgtctctactaaaaatacaaaaattagccaggtgtggtggtgcacacctgtaatcccaggtactcgggaggctgaggcaggagaattgcttgaacccgggacgcagaggttgcaatgagctgagatcgcgccactgcactcaggctgggtgacagagcaagactcatctcaaaaacaaaaaacaaaacaaaacaaaacaaacaaaaactattgcttgaaagggataccagatgcttgattttccccctcaaggggaagaagcaaaagcctagaatgactttttataaaagtaatgttgaggatctgagagtcttaaggacaatcagagaaaatcctgactttggatcatgacacatggagacacgccagtgcctgaagcacatggttccctaatcttggctcctttccttcctctttttctttcttaaaatttgtccacagtttactgatcttatgcctgctgagttgttattagcatcagtcttaccagttatcatttaagtgccaaccatgggccaactaataggaatacagaaatgcataaaatctagtcactgccatgaagaagcttggtctgtttgggagcggaaggcagtttatatctaattgcaaggtagtgtataaagataaccatgagtagtataactttagcagctcagaagattaggtaaatgtgggctgggctagtggttacagaaatttctatatagaaaagtttctacttaagtctttaaatgaagagttggaatggtgtagaaagagaaaaagacttgggaaaagttttttttttttttttttaaatctcagcttttactaatcttaccttgcttactttccttcagccacactcctcactgtttcatgaggtctttaacatgttctttcagatatccaaatgtctccctccttcacttccttcaggtcttaattaaagtattatcctttatctgagaactttactggtcaccttgtttaaaatgacaatatctcttccacacatactcttcctatccttcttgcctgctttgtttcttttttgtgcttttcactatccaacatactctagatttttattgtctttctactcctactaaaaaaaagtgtaagagccggacacggtgatgcatgcctgtagtcccacctacctcggaggccgaggttggaggattgcttgagcctaggagtttgagatcagcctgggcaaaaaagtaagaccctgtctcaaaaaaaagagttaaattaaatgaaaaattaaaaaacataagaccctccaggatagggatttttacccattttagtcaatattgtatccccaacatacagaacggtgcattttacaaagtaggtgctcaaatttttgttgaattaataagacagtggaactttaaagcaggagcttaaaagatcatttgatctaagcctctcatctcttcttttctttctttcttgctggcaggcatggaggaagaggaactttccattccatctattccttttttttttttttgagacggagtttcgcttctgttgcgtaggctggagtgcaatggcctgatctggctcaccgcaacctctgcctcccaggttcaagtgattctcctgcctcagcctcctgagtagctgggattacatgcatgtgccaccactcccggctaattttgtatttttagtagagatgggatttctccatgttggtcaggctggtctcaaactcccgacctcaggtgatccgcctacctcggcctcccaaagtgcttggattacaggcgtgagccactgcccctggcccatccattctgttttttaaaaaatttgataggactcgaagaaaaaatatatacaataaagtacacaaatcataagtatacagctcaatgaattacatatgtaaacatgtaaccaacaatcagatcaagatagagaacatttccaggaccttgaaagcttccctcctgtactctcttagtcattgcttaacgaaagttaccacttttctgatacccatcactatagattagttgtgtttattcctgaaattcatataagtggaatcaaatcattcttttatgtctaatttcctgtgttgaacattacatctgtgaaatccatgttttttgagttagtagtagtaattctttttcattgctctgtattatttcattatacgagtgtctatttgcgtcttctgttgacagacatttgggctgtttccagtgtttagttcttagaaacaaagctaccataaacaattttgtgcatgtgttttggtggccataaaaattcattttttggcaaagcgcttcatttaaatatataataaaacatatctccatatatatacacacatatacacacataattcttttttttaattatactttaagttctggggtacatatgcacaacgtgcaggtttgttacatatgtatacatgtgccatgttggtgtgctgcacctgcaactcgtcatttacattaggtatatctcctaatgctgtccctccccccaccccacaacaggcccttgtgtgtgatgttccccttcctgtgtccaagtgttctcattgttcaattctcacctatgaatgataacatgtggtgtttggttttttgtccctgcgatagtttgctgataatgatggtttccagcttcatccatgtccctacaaaggacatgaactcatccttttttattgctgcatagtgttccatggtgtgtatgtgccacattttcttaatccaccctatcattgatggacatttgggttggttccaagtctttgctattgtgaatagtgccgcaataaacatacgaacacacataattcttaagctcacatggttcctctcacatgctagatgatcattaaatgattaaagatgaattaactaatctcttattataagattatttcaaatgtattaaaataatttattctctctgctaataacatttatgtaaatcttagtacataatctttctccctacctgatttgtttaaagaataggaataaaaacattaagtcaaaagataagaccttaaaaaaattagacattgccatattgctttctagaaagttgctaatttatatgccaatatgaaacattagttttaaaaaaacatttgcaatttgataagcaaaatatcttacttaatttgtatttctttggttataagtgaagttgaaacattgtaaattgtttcataaacaattagatattaaaatatttataataaaacaatttttaaaagaatgcctcagatgtcttgtaaggtaaaatatattttatctagaattattgttctttattgttgtttctccttttaatagataaattttgaatagttattagaaaaacataacaaaattcagagatagaaacagttgtcccagaggcagccattgttaacagttttttatgtatacttctaaagatattatagactatgcatatatatgtatatgtgtataaatgtgtgtatatgtatatgtttgtaagtgtatgtatatatatttgtgtgtgcatgcatgtgtgtaatgtgtgtgtatatatgccaaaacattagatgaattatggaaaccattcattaaaatactttctggtttagatgtgttattgtgtaccattttgtgtattaaaaattagaaagggtctagctatgattcgtatctggctactggcccagaaggaagaaaagcagggtctggcagtatttggcggtaattttctgtaagacaagtggccttagcgctccttattattgaatcagttctttgacaatagcacttctgtttatagtactgattctgtagtactgttccaaagtgaaaagccaagtttttgaaaattagacagatgatacctgaaagaagctctttaaatgtatgaaagctatttggaggtatttaggaaaacatttaggggaaagatactttattcttaagcattttaggattcatttgcttgacagttacagtttttgcagaattcctctgactactgtttaacagtgaaaatttgagtttgaataattgcaaataaaattattcatttacttaaacttttatttacctaatttaaaaaccaaataaaattattcatttacttaaacttttatttacctaatttaaaaaccaatcaccctcaatataaacatattttaaaaatattttaagacagtttttcatgataatatatagtagtaatttgtctcatatataaaagatatttctgagcttgacttgaatgtcactgttaaataaatggtttgagcaacaagagtcagaaattttaattggtttctgcaggattttaatggtttagggaaaagatatttacttttgggatatattctttttttttttttttgagatggagtctcgcactgtcgcccgggctggagtgcaatggcatgatcttggctcactgcaacctcggcctcccaggttcaagcaattctcttgccttagcctcctgagtagctgggattacaggcgcctgccaccatgcccggccaattttttgtatttttagtagagacggggtttcattatgttggccaggctggtctcgaactcctgaccttgtgatccacccaccttgacctcccaaagtgctgggattacaggcgtgagccaccgcgccctgctctgggatagattctttttaaggcccttatttcaaaaactaaaatttgggaatgactattgtttactgaatactaactcactgacgtagcccaggataagttaggggtattataagagttcctgtttactggaattcttgtctcctactgaggatagattataaagctctaagggccgctgaaagaatttacatctaattgtgattggtaatatttggggaatttgaagaaagaatttgtcagagggaagagatcatcttgattttttaaaaatgttcaattttgaaatatatctttataggagaattgcaaagatagtccagaagatttccatgtgccatatacccttcactcagctttctctaatgttcacatcttatataatcatgttatattgatcaaaactaagaaattcatactgattttttaaaagggaattcaattaaccattttttttgaagacctattatgtataaaagagtattttggctgctgaagtatgtacaatatgggaaaacaagtaaaggttacagacaataatagactgatatcagagcttggtgtcattccttgaacaaattcttaaacagattatcgaacacacgtgttgtcggtacttaacaaaagaaggcactgatcactaggagccagcatgggttcacaaagaacaagtaatgacacctagcttcacttctttttttatggggtaagtgaactattaatagtagatatatcagaagatactctggccatagtatatatagaattattgctacatttattggattttaaattacgtgctgggcactggattaaatgcttttacataggttgtctcattaagttattgttttacagatgaggaaagggtccctcaaggttatacatatagcatttgacatcctcttaacgatatctttttagactagatagaaaatgtggtccgaatagttacataggtaggtggattagtaattgcttaaatggccatatccagagcttgatgattaaaattaaactgcagtacattcttagtggtgtgcctcaagaagctatcatgtcctatttaagatttttatcagttactctgaaaattgtaagggaatgctggtatatatacagaatcagcatcttcactcttactgccttatttctaatagttaaaaatgacagactgtatttagaaaatatttgttacgaaatatgttataagattttatatttggtgtgtaaatatttgataaagaccggcctatagttgatttttttttcagaagtctgcacaaatacaagatgggaatcttggagggctaacagcagtagatgtgtgtttgtttaagcagaggtgtgtgcctgggtgtgtctccttatttgtctgcagttggtgagtcagtggtttattataactatcccaatattcagcacctgcttaagctacactttgaagcatattgtccaaaacagttgattattcttttctactctgcatctagcttagttctgttctgtttgccacattttaaggtaggcattgataaacagtgtagtgagaagagagtaatcagaatgaagcatgtcttgaaacagttgcaaagtaattgaaacattgaggttgtttagcatggaagaaagaagagttggggtatatgataatactttttagattgggtaactggatgatctttaatgttcttcctgactcaaatctgagattctgtgaaacatgaagggttggcacatggaagaaggattaagcatatcttttgcattgcagtctggaggatggaactaggaacaatgaatgaaagttagaggaaggaaaatattggttcataatgaagaagcctttttatttttttaagagatggggtcttgctctgttgcccaggctggtgacaatttgaatggagtaaacattcactccctgaggcactaaagcatagattgagtagggtttaatcaagcgatcctttaaggacttttccaatttaaaaatttttaaaaattttcttcattggttgtaattccaattggcaaaacattttcttgggcacttattcacacttataatacttatggcttcatacagtatcagattctattagagagaatgataccttcctgataatcaaaatctgaaattatagtatgaaataatttaactagattttttatttttttgagacagggtcttactctgtcatccaggctggtgtgcagtggtgtgatcttggctcactgcaacctctgcttcctgggctaaagtgatcctccagtctcagcctcccaggtagctgggactacaggcgcatgccaccacacccagctaatttttgtatttttgtagagatggggctttgccatgttgcccaggctggtcttcaattcctgagctcaaagtgatccacctgccttggcctcccaaagtgatgggattataggcatgagccaccatacctggccttagatgatttttaaaaagtttattcacaattccgaaggaaacaagattttagtcttgttttagaaatgtcacagactaattgaagttgcttttaaagatgatggcataagtatcattaaattcaaatgcttgtggtttctcttctgtgtatctaaaaaaatgttaatgtcaaaaactgaaaccactcatgcctgtaatcccagcactttgggaggcaaaggtgggcagatcacctgaggtcaggagtttgagaccaacctggcctacatggtgaaaccccgtcactactaaaaatacaaaaattagctgggcatggtggtgggcacctgtaatcccagctactcaggaggctgaagcagcagaatcacttgagcctgggaggtagaggttgcattgcgctgagatcgcaccagtgtattccagcctgggcgacaagagtgaaactatgtctaaaaaacaaaacaaaacaaaacaaaacaaacaaacaaacaaaaccccaaagattattaacttctaaatgattcagttgtttaaatctaaaatggaacagtaaaccattttattcactgtcatcccttacacaaatcagagctttttttggccttcatgaccttcatatttttttatcctgagaatactctctttctttaagcccatctaaagtctaatttttaggacttaaccctgatccatttttttaaagtcatctcgggttcttctatccaacactgatatttttctttcttttctaacagtttggtaatctattagtactatatcctatactgttactaattgctttataatatgtaaggttttttaaaaaaattaacaggattataagccccttgaagactcttttactgaggcttgaaaactacttaatgaaattaaaatttacagactcggtggttgaattttagctaatgttgaaactcttaatagcatgagaaaaagcctatgcagaatttccatgtttagtttctactttttttctttagcaatatgatctttagtcttcatctgatgtattgtaaaatttacaaataatagtaatatacccactttaaaaatgaaaaataagaaaaagatttttccatcatcctcacattcttaataccaccatctcctaaattttggagtctcccttttgttgtttttcaatgcatatgccaatgtctttgtcattagccctcagaagtggcaaataattttaaaatgtgtatttcaaaacgaaatttctttttagaaaatcaggagatacattctagtaaatgtacttactggacctcagtagtgtactttttactttgttacattcatatgaacaccaaaaagtttaatgaataaaatagaatatattttaacatgtttaagaagtatgtctgtgacaacatctaattgagctgttgatgaagttagtttatagtcatcagcttcattttctatattcttcattccctgtacaaaatacttgtcatacccagtgggtgttccagacttagcatgttttaaaatcaaggtagcattgtcatattttgttttgattggcttttgctcaggggaagtttgggtccatatcagagatctgtttgccttcttcactgaagctaatgactttctgttatgtgataggctttcactgcttcttcatgtgggggcatctctgcaatgtaaattgctattttccagttattttacttaaattaaaacaaataaagtttctgaagacactcaggaaatgtgtgaatttactgagtatataaccttagaacccttgagcaggaaaacatcaaatcacaaatagggaggtgagtatactggctggcaaatcttacattgtactttgtcatgtaacactgttcacttactcatttttagaagctacatgtgcattatatactaatggtatatctctcaaataattgaaataatgaaaaattgataattcagagccactttttatttggcatgggatgtgattgtttttgcattaccacatattaaagtctaaaaggagttaaattttgtgatctagtagttttcagtggaaccttgttttttttttttttttttttttttgagacagggtcttgttctgttgcccaggctggagtgcagtggtgtgatttcgggctcactgcaacctccacctcctgggttcaagcgcttctcctgcctcagcctcccaagtagctgggactgcaggtgggcaataccacacctggctaatttttgtatttttagtagagacagggtttcaccatgttggccaggctggtctcaaactcctgacctcagatgatctgcccacctcagccacccaaagtactgggattacaggcatgcgtcagccaccacccctggcccatttttgttttttttcctcaaacatctatatggcactgcaatatagaatacaaataaaaagtaacatttttgtataactttaagtacatatttataacattaacttagcataaaggggatcagtgacattcagggtaggctcttaagttgtcttatcttcacgacattctattgccactttattcctagcatttaacagtgcctcatacatagcagattccaaatgtatcttagtgaaataaatgaatgaatgacttaggccattttgatgtactcaagaatttgaaattgaataactgataatgattgtagtttctcaatctctgcattaaatttctattttgttttgattgtacaatgtccaccacaactggaagagttgttttagttggttcttgagacttagagtagaatcaggacactctcaaattgaactatgactttgaaaaaagaagtggataatgtttcaaacctgaatcaggaacatttcatatttgctttttttttttttttgagacagtctctttgtcacctaggctggagtgcaatggtgcaatctcggctctctgcaacctttgcctcctgggttcaagcgattcttgtgcctcagccttccgagtagctgggattataggcatgcgccaccacacccagctaatttttgtattttagtagagacggggtttcaccacgcccagctaatttttgtatttttagtagagacagagttttgccatgttaccaggctggtctcaaactcctgacttcaggtgatccatctgccttggtctcccaaagtgctgagattactggtgtgagccactgcacccggccttgcttgtgttctttatgatgaatataaaagaagttaaacaggagatatcaccattttttgataatttttaaaacaatagtacaatatgttatgagtcccttagtataacagcttcactgaagtataactggcatatagtgaattacacaatttagtaagttttgatgtaggtatatacctgtgaaatcattaccacattcaaaatagtgaccatacccatcatctccagaagtttcttcatgcatgcccctttattatctttacttcatgcccctttattatctttacctcatgcccctttattatctttacttcatgcccctttatcatctttacttcatgccgctttatcatctttacttcatgccgctttatcatctttacttcatgcccctccacactccaccctctcaaagtaaccattgatctacttaatgtaactacagattgattgttttgtattttctagagttttatataaatggaattacatagtatgtacttttctttatagtctggcttctttcactcaaataattattttgagattcttctctgttgttgcatgtataaataattcattcattttttgtagtaatatcccattatatgggtataccaaaatttatcattcatttgctgatgagcatttgggttatttacagttttatttacaaataaagctgttacgaatattagtgtacgagtctttatatggacatatattttcatttcttttggttaaataggatgactaggtcacagggtaggtatctgttttaccttttttgggaataacatatttatcataaagggctaattttcttaatacacaaagagatcttgtagctcggtaagagtaagatcaaaaatccaacagaaaaatgggcagaggacaaaaccaggtagctaatatcaaaaaatatacaaatggctttaagcataagaaaatatttttggaaagctgaacaaaaaacttaatatgttgtttaaaatttaaacctctagagtcagtctgcttgggtttgcatattctctaacaatcagtgtaatcaagttccctaaccttcctgtgtttcagttttctcatcagtaaaatgtggctaataatagcaatatcatctacctcaagggactgttatgagtattagataagttaatatatgtggagttctcagaacaatatctgacacacagtaagtgctctatggaagtttatttttattattattcaaatgcaaatttaaacaggagaacattttttgattatcagattgacaaggattaaaaagctcaataatacacaacactggcaaagatatctagaatcactgttatatactgtaggcaggaacacaaattgtgcaatttctttggaggacaagttgactttacatgttaaaatgataaatattcatactttttcattcaattttaaataatttatctttgctctttatagtattaattatattgtcaaaaaacatatatgactcttagtaggggtctggttaaataaatgatgatatagccacacaatgggatgtcatatagtcataaaaaaagaaaaaaggagcacttctccataagctaatctctaagacacattattgggttaaaaaaaagtaagttgcagagcagtgtttatggtatgccgcttatattgctgtaaataagttgtgtatgtgttggtgtaaatacacatgcatatgcacacattaataaacatattttgcttcaaaatgcatagacttttctagaaggatacacaagaaagggaatagttccttctgaagagggactaaaagaagggaccaggagattggaaatcagatctcggtatgactgtggttgggtttggttgtgtacacttttatactgcttgagtatttatttcttgtcaagagaatattacattaaaagaatttgtagtatgtaattatagattcacaggaagttggaaaattcgtgcagagaggtaccatatacccttcatccaatttcaaaccctgctggtaacatcttatataaccctagtgcactatcaaaaccatgaaattgatgttggacaatccaaagactttattcagatttcaccagttttacaggcactcattgtatgtgtgtaattgtttgcagttttatcatgtgtagttttgaccaccacagtcaagatacagaactgtttcatcacaacagaaatccctgtgccatccctatatagtcatatctctcatcctaaccactgacaacgtaactcctggccttaaagagcatatagttttataggggagataatagagatataccaacaattcagtacaaagaacaacacaagtggctgtgtgcagtggctcatgcctgcaatcccagcacttcaggaagccaaggcgggtggatcacttgagaggtcaggagttcaagaccagcctggctaacatggcgaaaccctgtctctactaaaaatacaaaaattagctgggcgtggtggtgcatgcctgtagtcccagctactcaggaggctgaggcacaagaattgcttgagcctgggaagtggaggttgcagtgagctgtgaatgcgccactgcactccagcctggacgacagagtgagactctgtctcaaaaaccaataccataacaagtgccaaaagaacgtatttattgctttgagagttatgagtgatcaaatattaaaaaaggatcagaaaaatcttcatggaaataattagtatagttataaggagaactggctatagttctgattctgcattaaacaccactaactaaccagatgtataaaataagaaagttgagagaaagatttttttagtggtcccttttagtatagtcttaatactgtggataatttggcatcatccttgaaggagggctatgattttattcatttatcaaatatttgaccattttatgccaggcactgctctaggctctgtaagtacctcagtgaacaaaacagacaaaaatccctacccctaccctgagaagacatacattttagatgagtgaattaaaaaaaatgtaagtttacagcatgttagaagataagtagtaaagaggaaaaataaaccagggaagggggaataaagtatgggaggagttacacttctctaaaggatggccaggaaaattcactgataaggtgacttttaaataacatgaagacagtcagtgaaggagatatgacacaaatacaaatcattctaggcccagggaatagcaaatgccaagtctctgaggttggagcatgcctgcggtatttacatttgaagaagcttgtcattggagttgagtaaaggactgggtaatataggatgaagtcagaaaggtaatgatggcactggtgatgggctggttgtgctgccaggtcaagcaaggtcttatagaccattttaaggacttcagcttttagactaagtgatacgtggtatagaaagacattggatgagttggaacagaatagtgacatgattggacttttaaagagtcagtctggcaactgttgagagtaggctaaaggagaacaagggcagaagcagtgaaaccacctaggagactgttgcagtaattcaggtgagaggtgatggcttggaccaaaatggtagtagtggtggtggtgagtaattgacattttgaggtcaacaggatttgggggactgggaagcagggagagaaaaaagagggaggcacagaggttaagggtgatacaaagtttgtggtctgagcacctagaaggctagttacccatttgctgttatgggtaaaactatgatggaagattttggaggagagaagttggatcttggacaaagtaaatttaagatatatcttaggtattctaagtgagatgactgctaactatctgagtctagagttcaaaggaaaggaatgggctagaggtttaagtttgggaattatgtatagatgctatttaaagaaatcagatcagatgacttcactaagggagtaagcataaagaggcgaaggtccaggacagagatttggagcactacaacatttaaagtttgggaaatgaagaactagcaaaggaaacttagaaggagaaatcactgaggcaagaggaaaaccaggagaacatggaatcttggaagccaatgaagaaagtgttttgagaggagggagtaatgaaccccttgtcagatgctgctcatagttccagtaaagagaactggtaattgaattggtcattctagtttgcaatgtggaattcattagtgattctgacaagagcaggtttgatagagtggtggggaaatagactcattggaatggattcaagagaaagggaagtgagaaattggagacatgcagaaagaatcatttttctgaggaattttgctgaagagggagggagagaaatagaatagtaacttaagagagatgttcaaagagtttttttgttttttgtttttgttttgacgtgtttgtaggaggctgagaaaaaaatggaaaatttgatgggatagacgaagaggtagtggtggttaatggggatctagtgtgtaagtaaaaaggttgggtcttgggtagagcagaaatagttcacgctagtaatgaaagaggaatcagaatatgtgggcacagacgtagttaggtagatgtggtttgagagtttgtagaagttcttttattgcttctagtattttattagtaaaataggacacagggtcataagataaaagtgaggatgagagggaaggtgatggaagattgaggagcaaaaagttgaaatagttatgtaagagagtggcagaatggatgaatcaggaaaataaggtataattgtcagtcagcattaaggaaactcatttgaggctcctggccacgaatttaaagagaaaccaatttatcagacatcgtgtatttgtgtgtgtgtgtgtgtgtgtgtgtgtgtgagagagagagagagagagtgcatgtccatccagccacatgcagctgtgtaggtatcaacacagaataggcagaaaattgcgctgaaagagagagagagagagagagagtccatccagccacatgcagctctgtaggtatcaacatagaataggcagaaaattgcattggtaacaactagccaagcaagattgacatagtcagaaggaagacaagtagttaagcatgtatgcaaaggaaggaaggaagtaaatgattgaatatggatttaatttgggtaagaaggggattgaggacatgggaaggtaaaaggaagtgcagaagtcatcagattagtggactacaggtctgttgggttggcagattttttggagttaggatattagaggtagtgagctggtatcagagtgtgatacttaaaaatggtatttcgaggctgggcatcatgcctcatgtgtgtaatcctagcacttcgggaggctgaggcaggtggatcacttgaggtcaggagattgagaccagcctggccaacatggtgaaaccccgtctctacaaaaaaatacaaaaattagtcgggtgtggtggtgcgtgcctgtagtcccagctactcaggaggctgaggtgggaggatcacttgagtccagtgagctgtgattgcaccactgcactccagcctgggcgacagggtgagaccctgtctcagaacaaaacaaaacaaaaaatggcattttggaagggttgcatttattaaaattgagaaggtttaaggtttgactgtatgggaatgagtataaaatagggttgagggaaggatcagtggaagatcctagatctactgaagggcagaacttcctttctgataataagaaactgacaagcaagaattgggaaaggattgtgtggatgatgagattcccaagcattatgaaaataatgatggtgtaatgagcaagcagctaaaatcttcaagaaataaagtggagagcttgataactgcagtaaagaacggctacagtctgatgatgagatttcagtttggatgtttttagggaagagttaggaagaattgtctggaatgggcaactaggattgagaaagaatagaagcttttagtctgaggaactgagccaccattatcaggcctagagaggcactgaaatgaaataattacctctggaagccacatgctgtgtgggctctagactgataccaggtagccataaaatgccatgtgctagacgccataactcataccctatagttcgacaatatatagtcaatcactaatcaatgctatttctgtaaaccaatgagaattcctgtcaaacaattgtgtatcagtctgctccatgtccccctttgcctttaaaaacctgctggtaacaaaggctgaatggggcactccccaaggcaacttggaaatgtgtcctaggctgcaggtctcaaccttggctcaaataaattctctatattaattttacttcagtttcttcctttaggtcagtaggatcaagaagacctaccttcacatccaggccctgtggtatgaggagttgggagggaaaacacataacacttgagaaagcttcaggggaaatgccgataacagagaaccaagttgtagttagagcaagaatgactttaactagtagaaccagtgaagaacatcccaaatagaggaaacaccagaaacagagtcacaaaaggtacattatttgatgttggagaatagcgacaactctagtgcagtttagaatttaaggtttattccagtttgatgtcttcgtagtcacatcccttttagtatcatgtagaatttataggcattctctatattttaacatccaggaatttttcataagaatgaacatcaatcccaatattgaaatagtaggacatggcttaatgctgatcctgaaccattaataatgatttttgttacagcttcccagccacttcttcaatttagttgtagctctgggcatgcaatgcggaataatgacatctctcctcccttatgaatcctacctcccaccaagtctctcaggaatacccaaatcagagaaaaatattaattataaaaaataagcatagagctctttcatctctttcccaaagtatttctagaattttttcacctagtttatattactacatttaaattacccactaatagaataacagtgttcttaaaatatttttagaaatccaagagaccatgttggttcttaagcaccttttgttgttcatcagctacatgtattatatcactaatatgtttcagttaggtgtctttcaactttagatatcagaaagcccaattcaaacaaccttacacaatgaagaaatttattagcttaatgtaactggaagtccagaggaaaggcagtctttaggattagtcagttagtaccttaatgaagacaccaaagattcagatcatttccattgttccactctgctgtccacagtgctggctttattccagggtgggattctcagattctcttcatacagtgggtaccaggaaggagctatatgttctataaggaggaaaaattctggcttcctcctaacagaaaggacaaccttaaccagaggccaccagcaaacctcttctacctcttctcctatctgattgacatgattccttctcatatctgagtcagtttctggcagtgaggatggatccaccattgagctaaagttagttctcccagtttttgccactcagagttgtggcgtggatattggagaacacagtcacaatgtctgcttacagtgtttgccttggttgtgttctaatgctctgaggttctttattcattcttatctgttacatttttatagtgagttaaaatatgcttcatcatactttattggtttaattgccatgttcagagctttctgtcatatagagagtagagcaattattaagcattcctttctgcaaaaagggaaaaatgctggaatagtgaaaagattgaagatagttggcaaatttgaatctgtacctccttataaccaatagtttttaacctctttcaacctccagtaattgacttagctatcatttacatagaaactttagtaatttgatttgtatctcctttctctctgtcaaaagttgcctgaagcgttgtggtaaagtagaaagtggactgggttgtgattaagtttctaattaattctagctccactgctttccagatctgtgtgatcatgggcagataacttcatctcagaccttctgcttgcttctctgtaagcctggagagaactacctgtcttctcatcaagttgtttttattggagttagtgtagcgaaaactctcaaaccgtgtttttttctactctcacaccaccacaaaaatcatcatcaatacagaagaagacttctgtgaccaaaggtatgggggtttttccctacacaccaagcagtgcacatcagctgggtattctccagttcaattctggcactgtctacctggagaatttaagaacatgccaacctatccttaagataccagtcacaagtccgggccaccccatccttcagacaccagttgcaaatctgggcctctggaacttctgaccaactggtttcaagttgggttcctctttgggcccacttcctctttgggctcaattaatttgctggagtggtgcacagaactcagggaaatacttgcttacctttagtggtttattataaaggatatatgtagaggatacagatgaagcgatgcatagggtgaagtatgggggaaggggtgcggagctttcatgtcctccctgggtatgctaccccctgggaacctccgtatgttcagctatccagaagctctctgaaccagttttcttgggtttttaaagaagcctcatgacatcaacattccttcctccagggtatgaggcaggaccctctctggagggtcttaagacccactgtcagagaggctgggtagattaaagtcctgctatagagccgataaaaggagaagaggagaaggtcagaggcctgcctctgaggcctcacaccctcagcattataacaaaagacaaacaagggctataggggttaggagccaggaaccatgaatgaaaaccaatgtatatgtatcataatgctgcagagttaaataagctaatatgaaagaaatctgataaatatagagtagcaaacaattttaaattgcctgaattattatattctaatagtaaactgtaggcagttaaagagaggaacctgaataacacagaagattctgatgctaaaaaataaatagttgatcttagtttctgagtatctaaggtgtatcagaagaagataaggatgtgtgcagcttttttgaaagtagatgcttaatgaatagttagctactagttagtatatccaatggctacttctcaagtattccctagaatttttttaacttaaatttttgccccttttctggctaaagctgtttttgaaggtatcaactaggtattataagctttagggctttgtgtagcttacaaggtatgacagatacatttattcaaattattgactgttttctcatatacactttttttttcctttcttggaatatcattcttttgaagaaccccagggtttcacattgggtgaagtttggttgttattaccaaaagagatagcacatttcattgctgagaaccctcaagagcaagacttcatatttggagtagaatgaaattaagatgacactaaagaatttgacttataaaaaactaatatatccattcaatgtcttaggttaatgttcatggtgagtctgagtatgttaataaactgtattagctatagtttctgtatctcattactattggtttgaaactgggtatatatgcttcttaaattgttgacattcacctttttgttttgagctagtcactgttatctgtcatgttagacttggggccatagctttttctaaatgaaaagacttatcttaccatattttttttcttttacataagagatactattaatatatataagccttgaaaggaaaaggatactaatgtatgttgactgtgttactatgtacaagcataccaaacatttaacatttgtatcatttaattctcccttcaacctggtgagagagtattattgtccccattttacaaaaggaaacattgaaacatagagattaagtaaacaaaattactataatggagaaatcctgctttctccttcccttttaccctcagtgggcatttttcatacctgctttcatttaattatacaactctttgaagatgttattatcattttgcagatgaagaaaaacattaacatgaatgtacaatttaaagaataagaaaatgaaaatgtgtactacattaaggaatagaagcctatataaaaggttttcgtttggttttgtttacatcaattgattctcaaatgttaaaccaaccttgctttttttcatatcaacactacttggggccggccatggtggctcacctgtgcaatctcagcactttgggaggcccaggcgggtggattgcttgaagtcaggagttcgagaccagcttggccaacatggtgaaaccccgtctctactaaaaatacaaaaaattagccaggcatggtggcacgcacctgtagtcccagctactcaggaggctgaggcaggagaatcacttcaacctgggaggcagaggttgtagtgatcagagctcgccccactgcactccagcctgggtgacagagcgagactccatctcaaaaaacaaaaaacaacaacaacaaaaaaattagctgggcctggtggtgcatgcctgtagtcctagctacccaggagtctgaggcagagaatcacttgaactgggaggtggaggttgccaagattgccactgcactccagcttgggcgacagagtgagactccgtctcaaaacaaaaacaaaaaacaaaacaaaacaaaaaaacacaacttggtcatgaggtattgtactttttacatattgttggatttgatttatgtcatattaagtatttttacatctatattcataggaaaattggtctatagttttcttataatatcttagtttggttttgatacagggtcatggtgcccttttagaatgacttgagaagtgttctctcttcttcaattttctggataagccttttagaattagtattatttcttccttaaatgtttgttagaattgaccagtgaagtcagctggacctggaagttttctttgtggggtggtttttaactgtaatttcaattcctttaatatatgtaaggttattcaggttatctgtttcttcttgagtgagctttataatttgtctttcatggaatttgtctgtttcatctaagttgttaaatctattgacatcaagttgctcatgacgttctcttacccttttaatgtctgtctttaatttatctctctcacttgtgatattggtaatttatgtattttctctccacccccctcctccattagtctggctagtgatttattaattttattgatctcagagagccagcatttgctttcattgactcaataaaaaattttaaataaactttatttttttagagcagttttaggttcacagcaaaattgagtggaaaatacagagttcttatatcccccccaccagcctttcccacttcaacatttcacaccagaagtggtatatttgttacaactgaacctacagtgatgtatcattatcacccaaagtccataatttacattggggttcactcttgatgttgtacattctgtgggttttgacaaatgtgtaatggcatatatctaccattatcatattatcatacaaaatagttccactctcctaaaaatcctctgtgctccacctgttcatccctacctcccagttaacccctggcaaccactgatcttttcactctctccatagtctttgcctttttcaaagtttcatacagttgaaatcatatagtatgtcaccttttcagattggcttctttcacgtagtaatatatacgtttaaggttcttgcatgtcttttcatgcatggcatgattgctcatttctctttagcgctgaatcatattccattgtctggatgtgccacggtttatttatccattcacctactgaaggacatattggtggcttccaagtttgggcaattatgaataaaactgctataaacataaggacatacgttttcgactcatttgggtcactaccaaggagcatgattgctggatcatatggtaagagtatatttagttttgtaagaaactgccaaactgtcttccaaagtggctttaccattttgcattttactgatctcaaagaaccagcttttggtttcgttgacttttttctatttcttttctgttgtacgtgtatgtttttcattcctgctcatctatcttttctttcttctccttctgtgtacttcccttcagaagaggaggacacacttactgcttaggattagcttgcttttctctttctaatttttttttaacttttattttaagttcaggggtacatgtgcaggtttgttatataggtaaacttgtgtcatggaggtttgttgtacagattattttgtcactcaggtattaagcctagcaccctttagttagttttcctgatcctctccctcatcccactctccaccctccagtaggccccaactaatttcctaaagtgaaagcctaggtcactgatttgagaccttcttttctaacattcagaagtatattgtttagtttccagatgtttggagatttttttttagatgtttttctaattttaatttctaatataattttattgtgatcagagaatatactttgcatgctttgaaatccttgaaacttagtgagaatgttttatggctcagaatatagtctgagttggggtgttgttccatgtgtacttgaaaagatgtgtattctgctgtaatttggtggtggattctataaatgttaattagatcaagttggttgctagtggtgttcaagtttactatgtccttactaagtttttgtctactagttgtgtcattattgagagatttgttgaaatctctgacaataattgtggatttgtctgtttgtgcttgtaattttatcaggttttgctttaggcattttgaagctctgttactagcttaggatttttcttcttgatgaattcatccctttactcattgtgaaattattctttttattcttagtaataatctttactgtaaaatatactttatctgttattaatatagatactctagctctcctttgattagtgttagcccagttaacaatcctttaacctttatgtgtttttatatttaaaatgggtttcttgtagacagcatatagttgggttttacttctttttaaatacaatctgacaatctctatcccttttaatcaggagtttagaccatttagtcttaatatgatgactggtatgattagacttttgtctactgttgtgctgtttgttttctatttgtcccatttcttctttgcatttttctctcttttcttggcattcttttggattgagaagtttttaatgttctattttacttgcactattgtcttaggaactttgcctcttttcttttttagtggttgtcctaggattacattctatatctttaacttacaccgtgttcctacacattatattatacaacttctatattttacttctgtatttgttaaaaaccccacagtagattgtaattatggttgttttaaaccattttattttaaagagttgtaaaaataagaaatatcttttatagttacccacatatttactccactgtacctcatgtctttgtatggttccatgtttttgtttagtatcatttttcttctgcaaaaaatctttctcaatattttttattgtgcagttctactggtgacagattttctcggcttttatgtgtctgaaaaattacatcaacatttcagaaagatatttttactgggtaccaaattgtagtgtatcacctccggtttggtggttggctaggaggactcgggacttagcatatagtcaaactcatggttatgacttatcacagcagaagggtacaaagctaaattagcaaatgggaaaggttcatgggtgaagtctggaggaaacaaggcacaagcttacacgaatcttctcccagtggaatcatgcaggatacatttaatttaacaatgaattgtgacaacacatgtgaatacagttgaacaggaagctcattagagactcagtgcccaagggttttattgggagctggtcaggtaagcgtcctctgcctagcatgtagcaaaattccagtttccaagaaggaaagcagatgttcagaatattgtttgcataaatacttcaggcacagtaaaacaccctttttagttagggaatgtcaggaacccttttgaagttcaagttcttagacaccagccaaggcctaaccttacaagtaggcctttctaaggatagcactcctgagcctgctgtgttacctttttcctgcatactaggttgccttgtttttttccttttctgtactttgtagattttaatttattgtcttctgacttgtatagcttcaaggagaaatctgtgatgacttatctttgctccattgaatgtaatgtacctttttacctctggctgctttaaatgttttctttatcattattttcagcaatgtatgtgtgaatgtgtgtttgtgtttatcctgctagatattgcttgaacttctgggaactgtgggtttgtagttttcaacaaagtggaaatttctgtagctattttttccaatattgccctactctttttgttttcatgctttcattatggttatgttgattgccgacattgctacagaggtcatggcatctttattttttggaggggttatgtgtgtgtgtgtgtgtttctctctgtcttcatttttggatagttttattcctgtgtcttcaatttactaatactttcttttgtagtggctaatctgctacaaatcttatataataatatttttatttcaagtatttttttatatgtagaagttttatttgattcttttatgtttctttgtctcctcattgtgtttgggttttctcttatgctgttgaggaaacatttgttatagctgttttaatgttctcatctcttaatttgatcatctctttcatttctggttctgttaatattgactgtttttctagttcacaagtcacattttattgcttcttgataggtctaatagttttttatcgaatgctcattattgtgaattttatgttatttgctggatttggttgcattattttaaaggatgttagtttttttctagtatgccactgttacttacagataagttcgatcctttcaaagcttatttttatgcagcttcagggagaatctagagtagccttaaggactaatttaacctcacttctaatgcatggtccttctggagtcactcatggctgccctgctattcagcaagatttcaccactttgggtaatacaaattttaacaattcctggccttttgtgagcactgacagttgtttatcttacaactcctggtaattttctttttctaaaggttgatgttttattttgcccagcctcttgggggttcaccctccacatgtataacttgtattcagccaaagatccagtaggactgctgtgcattttttgggatctctttccgtgttgatctcttctctcaggcatctgccccctccccctccccctgaattctagctgttttggcctccctaaactctgatatatgtcttttcaattcagcaatgttcctaggttcttatgaggttacctttccctgcgccattgtttgtaaattacctccaggcagaagctggagggccctattattattgcccttttagggcaatagtctggtatcatagacttgtgctgcctttgttcagtgccagcaaatagtttcctctattttatccaatttctggttgttagggagaaggatatttccagaccctctttgtccttcatattcagaagtggaaatctccctataaacattgcatacttttccatttataccataaatgtttcccttttctgaagcaacttcatcctcgtaatgtgtgaaaatgtcaagcctttacttttttcttattatattcagaagataataatgatgcatgtgatcaggatctcaaacttcagattttgctcagattttgtttcaaatttttgtattcacaaaaaatctcctatgcctttgatgaacatctaggtatcactgtggatctgggctccaaggagggtgaggcaaggggggcgcctaaggtacaaaatttaaggagacactgactctcagatgtcaatcctgtgcttgtactacctggagagtaagtgtctccttaaattttgtaccctagatgccttgtttgcttcagtctagtacacgctttgcactggatattccagactaagatcacttttattacctagggcattagtctcaaaccattattaactagatcacatattgcctttgtagtaggtgtcttttttaccttcatagttaaattatttaaacttctctgaccatctatttttttggaggagttgtaataaagtctgatgtaaaatgccagttccttagtattggctgagaaatgagagaagaaaagaaaagagtattcagggtagcaaatactgtcccacaaagccaaaaccatgtgtactgaagccttacctatttttagtttagtcggccttggccctagaaaacagttcctctccctacctaggccagattccattaattccatgtgggctgttgcccactgggcatgcagctgtatttgcagtttgagagtcccaagtaagcctgactaggcttcaaaaatgaatctagatttatactaaggaattttaatatgggtcagagacatgcagttggtctctgatggtgggaagaacagagtttttaatcttacataaaatgtactctctttgaggtctttggtttgtgacccacttttggattgccttagagtgttcttgcagctggaatgataaaggaatctcttttctctcttcttagaatattaaaggagacaggaagaagtccagatgaagtgactcatggaaccatttgtttatctgaacctgagctaaatcttaggagagaagggtaaaaataattcattcttattatttttagtccagattaccaggatttttcagatagtgatgtaggtatgggttctggcagtaataaacggcaattttacccagaatggcatctgttaaatatcttcctctggcacttgaagtggtatttggtatctgtttgatagttcaggggttgttctaaaacattgatcctgtgtgcagaaagtaaccattaatctcatgttactactgcttgactcaattttctttatttttattttcttggacttttcttttttaaaaaataagaagagtagcatatttgtaccatctgcaaagcacttttataatggattggaatgtgaaaatctctaatccagaaggaagattcttatatagtctttatagataaatgcaatgtacctttctttaattactgggtgaggtaatatgttgtgaaagaaaatagtgaacttggattcaaaaaaacctaattatagttcaggttgaactgcttgtagctctgtgaccttgagcaggccagttaatctctttgagagtcacttttttccatctgcaaagtatgtgtatgtatgtgggaggtgggggaggatgtgataaaatctgcctgcctatttattcgtgtcagtgtgaagagcataataaagatgtgaaagcacttgggaaatgtgtaaagaacatatacatacaaatgtaaaaatgatatttataagtattttatctcagcaaaatcaagtcttgtttttatctttgggacactgtgtaaatatagtctcagctaaattttttttttaaaatcactgatagcttagaaaaagagaagtaaaaaaatacgtatattggaaaatggatggaaaacacatcaaaggttacaagttacctatgaaagaattgataaaatctccttagagtttgtgtgtgtgtgtgtttgtgtgtattaacaaaatttgaaatttttacttaccttctctttcacctctagactttgaaagtctgtatcagattttgtgacatattgtatgtggattgtctactttagattatccatggaaaactattttttaaaatcagtcgtgttgctccttgttgtctaagacaattctggatgttttctcctgattggtatgttttcaggggaatgcaaactaatttaatatagccctggtgtgtataatgagggtgttaaatctgtcagaacacaaatcacaatgattgaaatatgaatgtaatattttggtacctttgaaactattaaattactcccctatattacattaaatcagtgagagaattcccttggttggttcattcattcattaaacaaatattaataccattcctactattgccaggtactgttgtatcacatacaacagtaaacaaaacagacaaaaatttctgcctctatggagcttacattctagctgagagggaaactgaaactaacagataaaatatatactgtatcagatagcaaaataaaggagggaaaggggatgggggagtgttggaaggcatggcagttggaggagggcaggcctgggaaggattgtgacatttgagtgaagacctacaaggaatctgtacagatatctcagggaagaacattcctgttctaaggtatagcaagggtaacagatttgaggaaagtgtgtgcctagtatgttcaaggaacaaggaggaggctagtgtgactgaagtggagtgagcatggagtgttaggctggtgcagacataattgcggtttttgcattgtttaaatttgctgtttggtattggaatacattattaaataaatgtggttatgttatacataattttaatgtgcatttcttgctttgttttgctaatgacttattacttgctgtttattttatatttatttagactatggaaatgatgttagacaaaaagcaaattcaagtgattttcttattcaagttcaaaatgggtcataaagcagcagagacaactcgcagcatcaacaatgcatttggcccagaaattgctaacaaaggtacagtgcagtggtggttcaagaacttttgcaaaggagacgagagccgtgaagatgaggagtgttgtgcccggccatcaaaagttggcaacgaccaattgagagcaatcatcgaagctgatcctcttacaacactagaagttgccgagaactcaacatcaaccatcctacggtcattcagcatttgaagcaaattagaaggttgtaaaagctcgataagtgggtgcctcatgagctgactgaaaataaaaacaatcgtcattttgaagtgttgtcttctcttactttgtgtaacaacaatgaaccatttcttgatcagattgtgacgtgcgttggtaagtggattttatatgacaaccgctgatgaccagcttggtggttggactgagaagaagctccagagcacttcccaaagccaaacttctaccaaaatgttaatggtcactgtttgatggtctgctgccggtctgatccactacagctttctgagttccagcaaaaccattacatctgagaagtatgctcaacaaatctctgagatgcatggaaagctgcaacgcctgcagccagcattgatcaacataaagggcccagtccttcggcacaacaatgcctgacaatgcgtcgcacaaccaacgcttcaaaagttgaatgaattgggcacaaagttttgcctcatccaccgtattcacctgacttcttgccaactgactaccacttcttcaagcatctcagcaactttttgcagggaagatgtttccacaaccagaatgcagaaaaagctttccaagagtttatcgaatcccagatcacacatttttacactacaggaataaataaacttatttctcattggcaaaaatgtgttgattgtaatgtttcctattttgatgaataaagatgtgtttgagcctagttataatataatgatttaaaattcacggtacaaaaccgcaattacttttgcaccaacctaataagattaaaaccagtagaggtgggtattttgagaaccatgtatttcaaggacggaattattgtttgtgtcagctactgctcataggtaaaataagaggaagtcggagaatcgattgttgtgtttagcaatgtggaagatgttggtgaccttaaataagtgcaagttggtagacagatgggatgaaaagcttggttgatatggattcaggagaaaatgggagatgtggagacagtgagtgtagataacacttttgagttttattgtaaagggggaactatgcacatttggtgtgtagagttaagagagtgggctttaaaaaattttttggttctatgtttaatgtgacaggaataatccagtagagagggaatatttgacaatgcagtagaaggaagagaaaattgctgcagcagttttcttgaataggtgggaaataattgggattacctttagttttccaaagtgaccattgtatttctttgatgcttataattcacattcttcccttttaaagaacatcagtgcctgagcctttttatatacatatcctttcttatgtctgtaccttacccctcacatgtatacttttttcttttttttaaaaaaccctgcatgtggcattcaaacacatgtatgcttttatcagagcccctaaaatactttattacatttatttacatgtctcacccattactggattgtcgataccttgatctatgttattactcaactattggttctttgactgtagtgtttttattcattgctacatgcctatattagttacccattgttgcataacaaattactttaaaacatagccactcaaaacacacatttattatattgcagtgagtcaggaatccaggaacagcataggtgctgggtctcttacaaggttatgaaccaatgtgttgacagggcctgaagtctcatcagaaatcttgatgtgaaaggatccattttctaggtcactcataaggcaggattcatttcttctcaggctgttggccagaggcctcccttggacccgtgccaaagggccccatagagcatctcacagtatggcagttgacttagagcaaacaagcaagagggcaagaaaaagtgccagcaaaagagagtgctagcaagaagcacatcacaatttttataacctaatcacagaagtgacttcccatcactgttgccatattttctttattttttaaaattgagacagagtcttactatgttgcccaggctggtcttgaactcctgggctcaagtgatcctcctgccttggcctcccaaagtcttgggattacaggcgtgaaccaccatgcttggccaatattttcttctttataagcaagttactaggtctagcccacacttaaagagggttacacaacatgtgactatcagaaggcagggatcactgcagggacgtattagaagtccgccacccggtccccaaactctagaactataaaaatgcttaacttgttgaatgaatta

SEQ ID NO: 373 - DNA, 33388 bp, Homo sapiens
  source 1..33388: mol_type = genomic DNA
ctgggggtatctaggagcaaagatattgcatttttcatactgaatcctttgcatcttggggatggctgacaggcggaggtgaatcatagggctcaaggctggagggtagccacagcagcaaggaagaagggggtgatggctggcatgagcacgaagtggtacccataggccactcacatctggaaggctgcaatggtaccaccaattcagctgccagctcagtttaggggtgattccgggagacccaaggtggcagtccctttccactgttgcggctacttggagtgagtagccaggtgtgtgctgagagctgaagaaggagagtggaggcatggctttgtgctttaatttttggtgaaatatgaatttaaccaggagccaagagagagcctaggacttctccaaggtgcttggcacaatcggttttacactcctagtgtgtctaggaaccgagagagagaagggacctagcagcttggtactcagggcccaggccagggcctcgcccaagtggagcatagctgaggaacctctgagtgccaggtgttatgggtgggacaccgacctgcgctcaccgggacacttaattcttcctccaatccctggtctctgccgcgtgggctagatctactgcaagtgctgggcatggggaaaggaagagagaagttaaaggtgaaatggcttctgctctcggcctctccgtgagcgctctcggccctcctgtggagatcgccacgtcctatcacacgcgtccctaaaccttgtcactcgagcattcttgtctcccaaactctgatggtccgcagtgggtactgggctccctgggccctgggaggaagacggaggagtttgggtgaaagatcagacggtgcgcagccctgaggcttctgagggcagagggtgcgcttccttgccctcggggcggggaagccgtgaacgccgaggccattgtaaggctgggtggtgcggagcgcgggaagggggctgggatttgaatgggagcctgtgattggccgatccctggactgacgtcacttccccgcggggcgattagcctgcgagaggagggccggcggtccagtgcgctgggggcggccggggcgctcgaggctctctaagcgctccgcgcgggtgccctacgtgagccccgggacgccgtcgaggcaggccggcagcgccggtgccaggacgcacggaacggggagcaggggagaaatgcgccgggagggcgagggaggaagggaactgggcgggggctgcgggcctaggtggcgggagtcagcgtgtgcgtgtgtctgtccatcccctctggctctccgcgtgcgccccaggatccgggcacggcgtccgctcaggctcccgcgctcggcaggcagcagcacgtggagcccacggcgcggcagcggcactggctaagggaggcccgtttctctctttggttatctagctgtatgagtgccacagagccgtcataaagctagataaccgaaagtagaaatgattctcacaacttctgcgtgcgagcgcccgccccaccgaccgccccggcccggcccgcaagagccagaggagccgagaggagcccagcgccggcccagcggactccagctcgacggagcggccgcgccccgaccaggtacctgacctcggctctctctctggggacacttgcagtgccagctttcccccagtcctcctctttcctggtcccccacccctatcccccagcgccggagcaggaaccccaaagtggagcgggccggggagagggagggggttggggttgcagaggggtcgctggaaggggaaggcgccagccttcgccttcaccccataaatcaggctggaacaatccgctcccggagccgtggacggggattttgggatgcaaatgcgatgggagagagacagcggtcggtagggggtgggtggagggagtgaatggggtgggctgggggctgccctgccgctaacaatgcggcctttatcgaattattcgacgagtcagcccctgagcgccattagcatacggctggggggttgccggagcttcgcccctcggtgaggtcaagttcttgataatttgatcacttttcacgggctctggcagctgcctttgtgtgcagttggggggtctgtgtgcagcgtgaagcggagcagaactggcggggagtgcgctcaatggcaaggggccagggcaggggcctccctccccgacgggtcggccctgccctgcatacaaaccaagagccggcgggtgggcgggaggaaccgagctcagtctcccgctacctctacgccagccccgaccgggctgctcctgcccaagcctccccaacttcccgcgaggttaaggtgcaggcaagctcccagagctccccctcctccctgccccaagaagtcacgacataagatgtattacaatgtctagcaaataaaaaagcaattgggggaaatctgaattcgttcccatggcaacccaatgcagcacacccggccactcaggctcccagcccctcttaactgggctcagggagtggggcttgcccctgctcagtgcgtgggggtcccggccccacacagtgctagggtccctctcgagtttctcatctgccttcaggtcactttccaccctgatgccttggcttgtcctgaagctcagggcccctgtagcttgggaaacctcccaagctccccagcgagtggctgtagaccaaggaagggaccctgcccggcttcagggaagaaaggaagaaaggtaggctcagactccccgattggtaggggggctttctaagtatatgggtatgtgagtgctatgatagacaggctgaaaggaactggcaccaccacccagccctgacccccatcccctcacccttttacatgagaggaaacagatctggggatctgaagtgactccctaagggtcacacagctcagaaggcagagctggaccccaggccaccttacgtacatcttggctcacttcactccctggagcctctcccttagtgattttcacggcccctcttctcccagcctttgcccagccctcttgtaaaaatagaaatattttttccatcttcactcctgcaaaccttttttgttctttgcctaacaaaattattttgaatatagggtatatatgtaaatggtgaaaattcaaacagtacaaaaggaaaaccccttggctctggggaggagaactgtgtggctgaggtggatggtagagggagacttttcactgtatacctttggaattgtgaaccctgtgagtgtgttagcattcacagtaaaattaaataaaaaatacacacaaaagaccaggcagggaaagtcagctgccctcctactttggtccccggttctcctcagagataatcatgggcagaaggttttctgaatccctttgtaccccacctccattttgaaaggccagtttccctttttttctgacaggaggctggtgaagggtgactagagtgtttcgggattcacgaggctatgggctgcatcccttgggccgtccctcccttcccaatgcacctgggagcctgtgtgctgatggtgacctcatttcggaggaaaccggagcagcacttcctgcccccttgccctgcactccctgccttcctccctcaccggccaacgggtgtgggcaaaccctgggccccgggcttcgatcttcccctcccaccacccctacccgtttgctgtgttgcaagaactagtccttcacttgccagggtggctttgcagcttcccagcagtgtctacacagttcagatgagtgttgttgttaaacaccactgtcccataccatctgggcaggtctgaaacccgagttgagggtctgatgaaggaggagtctgtgcgggagggcaacgcggcattttcccgctttctacgaaaatctgttgatgcaaacctcccgcttcagagaaagatcgcggcagcagggctgcggagggcgatgagcatgccagttctaatctccaggagcccatcccacaccttccttaaacggccctcggagagaggccagaggccagaggccaacccatccgatttcggcctcctggtacgaatgcctgcccctactagagcaatgttcgaatcccctttggacacttaaagcccaaggcacagactcaaaattggtgcctgggcccatcaacgtcttctggcctgcctggacctggagtagccggacgggtctggggccttctcagtccctcgtctcctccattcctgtgccccaggaaggccttccccaagcctcctctggccactggctccccacgtttgggcttcatttttgtctccggtttgtgctactctttcttcatccaaaaaggcgttggagatcccgagaatctgctgcagcttggaagccagaatcttagagaatctcggatacttctcaccccattcctttcattttacacctagaaatggtgtaaaaaggcccagtggctcacggaaggtcgcacagaaggccactgacagggcagcgatcagtacagccaccgtggtgggcgaggcatccggggcttccttttctctggtccacgaactcccaactccgaacgctgtgggactgcatgggcctctgcccgggccaatgaaatgcgctgccgagaggaggctgcggcgcggcctgaggccggatctccacaggccggagagttctctgccggccgcggccggacctcccgggaaatgggaccagagcgcggagggagcctggccaggaggcctcctaggactcagccgcgacgctgaaaagcatgaagggtcggaattaggcactcatttagcgagcgttactaatccgaagttacagcgctaattccctgatccggccgctcccacacgcagcgccgggattagaggcgcggccgccgcccgccccgccctcataccccaaacgcgcccgccccgcgccctcgaggctgcgggctcagggctaatccgccgcgccgcgctcgcctggcccgagcgcgcggcgggtcgggctcggccagctggggcgagccggcctgttcgctggctcgggcgcccggttccgggctgggcaaggagcgcttggccatgagccgcgggacagcccaggcgggacggatgcgccctccagggcccaggcgaggccgcgcggtgcagaaccgccgggatttctccaacccgggtatgcgcacccacagcagcggcctttggaggccgcggcgccattttagtggccttccttcccccttggcatctgtcgtgtatggtgtggctgggtgtccccagctccccccatcccgctctgactttggctgccccctccgccagcctggatagagtgaccaatcagctctgacctagggtgggatgcgcgtcaccatggcgacggctagggcgccctggcagtgctgcccatcgcagagggcaagtcttcactccgcctagatgggtgtgaagggaaggtggggacaggtgggggggaggggcggatggagggaggccgtgatgcctcgtccgcattcccaccccattttgcctagggtcagttcagctgggtcaggcaggggacaaatggatggtgtggaaggggcctgggtaggggcctgggtttgtcctggggcggctcttccacgagtcctctcatcccccccaggacctagctctggtataaaggctcatcttggtctctcatcctcttctatgtctctcttccaaagacagtggtgttcaggagcccccagacgcttccccccaattttcttgctgttaagtgctgtgattttagacaagtcgctttccctgggtcttagtttttgcatccagaagatgggctgctgtgcaggctcatgcctggaaagccttcagtgcacaccggctgttctgtcagtgttagagctccttctccctgggcaagacctttgggggcaggattcagaacctgaggatgtcctttctgtccagggcagccaagtttgggtgtctcgtggcttcctagagccagcttttcatctctcctccagacagctgggagaggagggaggatttttaaaaatagagccagggtgggggctgtggctggaacaaaaccttggtcagtggctctgagaatggggcgctgcagctcctaaagctctggctccttccttcaagcctggtctggcttaagcaccactttaagtggtcccggcattcactggccagcccctcaccgcaattgagccgcaggggtttgaaaagagggccagggcctcaatgacaggaccttgggccaggctaattggttttggttcaaggggatactggatttgtgaaaagctccaaaccgcctttcccacgccagagccaggccatggctttaaggagaagggttcaaggagcttggggccaggcaagaaagctgagaatgaggtgccttcagctgatgaccctgctgtcatggccaagacagccctctggttggagagggtaggaagctgttgtgaggccacttccaggggcacctgcatttatggcctgtcaggtactcgagagtcagctggatacattcctaaccttctacacgtggctgtgccaagaaaggggcctcctcctttggcataccttagtggtggagaggccccattttctcaagtgggatcatccagtaaaagaagccagcaatggccaagtttaatatttcttgccccaggagctggactaaacccagacttttatattcagggggcatcctggactccatcctgaggcaggtatgcagttggtctcaaggtgataacccacttctgtctcttgaaatgtccttacactaccctgggcatggacaaacaaagcagagatgagaaacaggaagcccttggtacttaaaaaaaaaaggtcaaatatttctattctcaaaagtccagcattaattatgttatgatttaaatctatcattatagataattttaatataaatgccttgaagcatgtatcttaaggtgtaccagttacctatgtgtttggactaaatggtttcacatatgtatatataatatacccattctacgtgtgcatatatatatatgtgtgtgtatacatggtctatataccaaatcatatgcttatattaacaatcagttatgttaaggatggaggcagggtggggtgctataaatcatcagtcccatttaaaataacaacattgcattgactgagactagtgtttcatggttcattgtgtgttgaggggagcattcctatgtgatcacaggctgaagaaatcccctaccttttctattatcatccaaatttttcactgtgtttgcccacttgacgcatataaataggagaaaggcactttgaagagatatagaactccgtgtatcacattttccatttttatttcaatttttaattgcccagagcctaatttctgtgggcctctgctgatttgcacatttgagattcgtgtgtaaatatgcgtgtggcatgtgtacacgcctgggcctccttatcacaaagtgtgctctctcagtgtttaaatacacacaatccacatcgacacatgattatgggcttacgtatttgcttcttctctagaatcgggttaattttcccttcgctaatcctcaaacccattaagttccccacctccccacccccacaaaaaattgcaaaccctaccacagaccagtggtctcaccccacttctccagcaagcagttctccaggcggggtgctggagtgacggttcctattaggcagacttcattaatgttaccaaatataccttggcacatttactcgcctactatgaagtattaccataaataattaaaattaaactgcacttgtcaaaataaatgaacaaagtagagttagggatgtctttgccttgatttgcttggtttgcttattcactaatttgaagaaagaaagtgagagaaggaaagaaagaacactgctacagactgccacgggatgggcagaggagatagggagagaatgcagagagagagaaagagaaagagagacagagccctcagtcatctccccgtgggtttccagtcattagggcactctgggaggctggaatgcagcctttaacgtcggcccataatgaatattgaggtgtggatatggaaggagggatttctttgtttactgaggaatggccatgggagtgggggagaggattgcctttggggattaaggagtgggctttgtttttataaagggccttacttcttttctgaagttttctgcagctaattgattcaattcagacattcctcctccccgcccggccctggcctcgtgtttctgagatgtgcacagccccatttccccatctgctctggcctctttttccactgtgacccttgaaaagggtgtgaaccttcacatcaacgagatcacaggctatggggaaaacagtcaggggccgagacctttgtatggatatgtgtgtgatataaacgcacatacacatacacgcacatatattaatagaggtataatttacacctagaaacagatcataggtgtacagttctgtgggttctgacaaatgcatttatactcatgtgaccaacacccaagataaacctcatttccttcattccaaaaacttctttcctacctctcagcagtcaatccctgccagtccccattccgatgtctcttaccatagattagttttacctatctagagtttcatataaatggaatgtatgccagggcttttgaaaatgaatttatttagagtctggagggagcaatgtcctgggaggcctggctgagcttgtgtccaggagcactggacttgtgttaaacactgtccccttggatgggcccagaagtcaaacctgtccattagattttttttttttttcctttgggagagctggtatgggctggttgtcctccaggagagccctgttctcacccgaggtctgttaatgagctggggacaggtgagcctcacacgttccaacttggctgccttcagcggcatccaggagcagtggtgagctattaatggaaggtgccggctttgtgctaattagaacttcctttcagcttccatctgtgcagacactggagcccctcactggtcagcctcgccgtcccaacccccctcagtttgcaacctagtttttgtcccccccaccccccatgaattagggggtgctatgagtggagctgctttcctctagctctggtcaaatcccggctctttgtgtattgcagaactgtactgggtggtatttctcagggcttctctctcttgttggggtggagatggacctggaagatggagttggaaagggatttgggcaccatggccaccctcctgggtaggctggacttacatcatcgacctgagtttgttttgtgaaagacctctctcctctgccctctggagactgtgacttcagacccttgtcctctccattaccccagtcctgatgtctcccaagtctgatggtacccacccatgtcaactacagctgccatctttgccatctcaggcagcctacaggtgggggctgtgtccttgaccctcttctgaaaaagaaaaacctatttttttccttcacttttgctttttatttctttcacctcaggcccaatggatatatatatatatatatatatatatacatatatatatatacatatatacatatatatatatatatatatatatatattttaatggaggttgtctcttacagaggtttcattgaaaaagaagaaacaatgtcccattaacgtcatttaaagaaaaagcacctctcagaatggaggttgggaaagctagggtttcttgcctgaatatcagttgggatgaaatcccttgtaaggaactcaagagaggagcgtttcctcagaatgctttctttagctcctgagtctccttaggtctccactggggttgtgtgtaaaaataccaagccctccctgacaatgcatctcattctcttctgcttgaattatcctgataatgagagatcacccacttctttgacagtgtagactaggattttaaaaattgggagtgaattattggacagtgtggcacttcaccagcttccctcaaggttctggatctatgctaaagaggggtggaaatgcttctggggtgtccagaagggctgcagaaattcctcgtcactggtcatggggagagcaggactggcttgcctctgtggcctcttctgcctctggaggtgacaattcctgatttgaggcactagggtggaagactcaggactatccaggaccaggttaataaaccggcagtccagattgcagaagggcagcagctgggggctggggacatgcccatgcctgtgggacagagttcttttgcatgctttggcctttacgactctgtatccttgacaagtcacaggcatctctgggtgaaatggggacaatagtacccatacctccaagggttatgtgagaattaagtaaaatatgcaaataaagtgcctggcatacagtaggcactgagcaaacggtagctcttttttccaggctggggcaagggatgcatataaatgtctggatctgaagtttgaaattccacctgctggagacagtgaacaccccagtagataccccaaatcacacagaaggacggatgaccagctgccttcttcccccagggcatgccatacacactgggcctgaagtgggagaatcgggaccccaaaaaaacggcttgtggagcggggttgcacatgggtgtaaagttcccagcttggctgcctggggagggggagcatgtaaatgtctttagagatttgaagggaccaggatctggactgatttgcgttgcccagggggctggggctgggagccaagggggtgctgccgggaggcccaggttagcttggggtatggcatttctaacagttggcgcctgcggaaaatggcctggggttccagctctggaaggttccgaatctcagtattcacgagcggcgctgtccggagcagccagggttgtcccttggtggtctcgggcaggttctccgcgatgcgcttgctgggtcgcaggtgagaacctcacggttctccatttccggagatccagctctgagcaggcagagggtcgctcccgtcgcctgcccctgcggtagccaagcgggtggctggaagcgtggctagctggcaggtaaggagctccaggtgagacggaacacgacccccaacccccttagccggtgccccacccgatttctctcctgcgtcctgggagggcatggttgaggcgccaccggtgcccagcaacctccccaggctgtggttgtgacctgaggacgcgtgtgtccccgccctcaggccaccgctacgcgaccctgagtgcaccttcaagaaggccgggcacgtttctgggcgggcgtggggggtgcctgatatctccgctctattttacagttactcccctgctggtgcctccctccttggcgcgcttcccacctgcgatcggcgccctcttcgcagtcacgaactcgccagcagctagcagcactgactagtaggagggcccgccggaggagaggtgagcgaccagagccagggagtgggtggaggagctggctgcccgcacccgcactccgctccagatgtctcagagagtggactgcgggttgggaggttgggaaattccaggatcaggttggtagtgcgcctgtgtttttacctgggtcaccagcaagacgactcccctcctccctaggcccggatccaatgtcatccctcaccctcaacctgtgaaatggctttaaccatacacctgctggcttgttgtgctctgtgacataatttggcagaacacggcgtgtagcacacagtgggcgcaaagtaaatggcggctctggcggttctagcaccggaggcggcttcttggacacccggcgttcgcgggagcctgaggcgctcggttgctagagccttagctgggagtggcgcggctgcttcccgcccgcgcaggatcaggccggcccccgcgggcctggagctggatccagagctagggaaactggaaaaacaggcacaaactcggaagccgcggtacggcaagagcctaagcaaagaatcctttccaagattcacacctcgtctacaccagggcaccgcctgggcctacggccttccgaacccgaagcgcccgcagcccagagctggcatcaggccatcaggccgggaaggtcgtcgcaggccccagagtgcgggcgcggggggcgcgcgcccacaggacgcccggggttgggtaggcaggagagaagggcgccagcaggcccgcggctgtttcccctcggtccgcacagcgggcccgggaggccattttgagagcgcgaagaggggcggcaagatggctgcgtgggcacccggaaggtcgccgcgccaagggcccgctgagcccctcctcccattcgtccagccgcgcggcccacagaagcggaacgcgcgtcgagagcgccctgtccgctcgccccagacagatgcccggttattcattaccgcgaggcctagaggaaagagtggctgccgtcttcctgcccacagcccgccggaccctccgtcgcggctgcccggtccccggagccgcagccgccgagcccggctgtgcgtgtcgtggctgctggggagaaagaggcttccggtaagagcccccctgactgggctgcccaccccgggcaggggcggaaacggccttccccgcgtggggaacaatggcgttattttggagtctgcaaccgcgagcgcttcaagctctttgattattttcgaggagtgttaggtgcgtggctaactcccgcgttttcttggaaccacgaagcccaaaatggcgagcgggccgtggccgccctcctggggctgagtgtggtccggagcgctgagagtggccagggagccgtgggcctccatcgtccctgtggttgggactgaggaccggcctggaggctccattcacaccatcgcagggcaggctgggggtcagatgcggatgaagcgggccgggcagtggagctgcatgtttgagcttgccctctccaggcctaagggccagagcttctgctcttctgccttctttgctcctatcctaccctcgtgaataatttaagcacaatcactgtttttctagctgtccgcattgacccaccgcgacctcgaagcaggtcccaggcgtgtgcatttatatgcagagtgaccaagaaacttcagtaatactagtttgtgtctttggagtcccactttttgccagggctagtgctaacagcttcaggagaattcagcctcaccttgacaggtagggtgatgattcactatttgtggcttttgccgtagctaggatgtggcagagccggttgtggactcggggctatctgccccaaggcctgcgttcccaacctgtctctctgcacatacacaggaacacagggattcatcaccgctgtggtttcatctttcagataagcaccaagcctttcctgaatccaagtccccatccccacacagccctgcctcacaagtgaggcatcccccaacctcccagtctaaagccctggcctcagatagattgtgtgactgaataatgtgtttgttctgagcttcctggcagccaagaaaagcaaacatgatggtttataaccttgttttcaaaatgaagctcatcaggattttagagagatgaacatttttcctgcataagacttatagaaaatgtaaagcttagtgattatgtaggtcaactgctcatgtcacggatgaggaaccaggtccagagaggttaagtgattttcaccaaggtcacaaaattagctcatacagtgaggactgagacccaggggtcctgactcccagtccagttcccatcctctcatgaccaggctttagtgggcttctcaacttggagatagtttaattgtggtctagcgactccattcctcactataaattgctgagacctggatgctgccttgttcctttctttgcccccagttcctagtgctgggctggactcatcattgtgggtgtctaaatatttgataattgagtggggctaaaacttctgataatgaggggatgggggcggtggtagaggggaagtccctgacttcagttttctagggggcctttttttttaatgttaggttcctgatccttaattccctaggtctctctcctggcaagtggtacgaggtgggtagtgtgttttcccttttggcagtcatcctattcctaactgccccatcacattattgaaccttataggaaagggtcatttgtgtcttgggggactatgttgtcagtgacacctgcaagtccctttaggtgaactgagggaggtttccccaccagcacaatggccatgagacctggccgactcattcttttatcctctttgggtggagagtcagcctttctgtacttgctcaggtttgattcccatggcttaagtacaaatcacagaacgtggcttagattagtaaatttccatggctcccaaaaggtagcctttgaatccctggcatgataactgtaggtgctgaataaatttagtgaccctgcaacagaccagattctctggaattctaggctggaaaggtgtcacccctggatgtggggagggttatgcttcttgatgggagcccccgttggtagaaaggctccaacagatcctggccaaattctgtcatctttgggtagaatctgcatgggcaaagcagagtaggtaactagggcttgtttgcagctaaagccccagctgtggaagaaaaacagggttcagctccccagattagttactgtctacaaggattaaaggccccaaataatggctggcttctcccctcctctgtgccaagggaagacatgtaaatacagccccacgccagcttaggcagtagatgtgtataaatcgaatttagcaaatcagatcatggtttaaatgcactatttaaagcagtcctgcagtgaagccttttacaaagggaataatcattttgtgatgctaatcatcagcctccaatttatctcctttgtaagttcagatgttggtgcactgggtgttctgaaattggggcgctcttgtgtagggctctggtgatggctgtctgcctttttctgacctctcgttttaaatgggtgcatgtcctgtttctcactgggggcctcaggatgcttgtcacttagcctgatagttctcatctgtcccacttatctttttataatctgatagagcccaccgttcagctgctcctggctccttttttgagacttttgcccttcctggggagaaatacaagccctgctgttcttgaggtgttaaaaccagctccctctctgagctgaactgccttttgtttccctgagcttctggtacctctggtgcagatcagaaagatgatcttagagtcgaccagataacacaaatcagccctgaatttagaaggcgaattaaatgcagccacccatttgctgaataggcaatatccaaaatattctccccattcacggcaaaataactgaggcctggatgttaaagtgacttttcccacaagttaaaatcaggactccaaggagaacctgtctcccaattgctataaaagtgttttatatgctgagctgtagttcctttctctgcagagaaaatataatcagagaccatctgggtgggagagaaagaacgaagagaaagaaatggatcagagtggaataaaggaagtgggaaggaagctggggggcttcgaggagcctgaccttgcttagcttacaggccctgatatagtgtctttgtcaatgctgccactattgacgcgttcctcggtaattatgactgtgtgttggcatggcgactcggagtaagaagactagaagcactgggtaaatgcacgacttgttcttgccttctaaagcagagaggagcttttgtgggtagttcctacagggatacatggtagaaaattcaccaaacccagtgctggagtgtatttacaccccataggagccaggtggccctgagcatagattgtacaaatagaggtccttagcaagactggcatctaatgcagaggtctcccagagcctccctcttgtgtcttcctgttggtctttgttccttagccttgtaatgtcaagtatattcatttctgctcatttctgggttgtctgtttcaaaataggtttatgttgcagtctccctgaatttgattgatcataaaattatctatttcataggccatgactatgtatttggaaactgaagggaaaggctgatgggcacagctggggcttccctttctatccttgtgtgcttttcttagatacttggaccacattctcatcctcttctgaaaatggggagaagttgctgttgtcaagagctgtgctgtcctttatgataaccactagacacacatgctattgatctcatgaaatgtggtcagtgtggcatgttgaaatgataatgttgggttaagtacaatatattgttaaaatgacctgttcattcttactttttaatgaggcttctgaaacatttaaaattatacttggaactgacatattttcactggacagtgaggtctacactagatgctcaagacctcctccatccccagtgcttagtaactaatcctgatctccccccaggaggcctctggccacacagggttctgtgcatagaggtccatggaaaagctagagaggaggcaagtagagagcctcgggccttaaggggcttttaggagtgcctagttcagccctttaaatggggattaccccccagtccttggaggcagaagtcgtggcttgaatctgcaggcaacattgtatttttcagcatttaaggtggggacaaggcagccaatgggtaaaccccagaagagtctttggatgaaggtttagcactgccccagtggagtttgaatgggcacagctgtagataacaggagggtcgtcctccttcccctgtccctagcagtgatttcatagtctcccagatgtgcagaaaccacagggcatgggaaggcagccatgcatcccaggttcgtgccaaacccactttcagcaggtttgtttcctttggcccgagggctccttgtcgcccctctcctggctgcccctcctcccctcagcctgtgctgctctccgtgagcttggagcttctgggatgcgtcttggctcagagccagcgtcttcttggagaggcctcctgccctggctccctgccaaggctgagggcctcagagagattttccagggagatgctgggctcatactgctgtcaaagggcagaggggcctcagttagccttctgcccttggaggacccctggctgtgggtctgggcttgcctccagccccctttccccctcagaaactccagtttcctcccctggaaaccctagactgagttaagggccttccagctccagtaagccttgagtttataaaaagaaggcccctcacatgagcctgggaggtaaggaaggggcatcggggaggccataatgagtcatgacgatggggacaggaaccatttactgagcactgactctgccaggttctgtgctaatgctttgtatattgtatctcttttgagggccatctcttggggagaaaaaagaacagtaaatctgaccagggatttgcccttcttttctaagccaaatgccatttgggtgactgcatggggtgtgttacaggagctacaaaccttgcataggagggactatcagcccccagtgagtccttgtctcccagagaatcagcctgggctttgggaagcagcatgagttcatttgcgttgccaaaggatgcctctgcagtgtttcctgcttgaggctggcagtacacctggagaatcaagatgggagggctccatgctgggcccctgggagccttggtgcggtgctagaggggtgagcagcataccacccggtctggattcatctcctaattgtgtgccccatatccttgctgtgcctcagtctgtaaaattagggggttggcccaagcctaccagcctgcccacagtgccaagggattgtggctgctcgggatgatgctggccttttactttctgcaatgttatatccccctgatgtagcacgtatgatcttctggaggagggaagggggcccacatcctctgtcccatctcatcttgtccttaagcagagaatatcaagccttcctcctatctgcccagttctgcaccatagctcctgctgtctccttaggttaggagaggtggcacatgcctctgaaggcatgttacatccttgatgagtgctgggggaaaagggagtaaagaaacaagtctcaagtttatagccaccccttccctttgaatctgtagcttttacccagtattgagtccactgttctctcttctactgtgggtcacagactccaagaccatggtggtgtgaggcagaggcagtgtggcccagtgggtatccaggtggaggggttggtctgacctaattcagaacccacaggacaccccttcccctcttcctctgagccagttttcccatctgcaaaattgggaatagtaatacttaccttgtgacactcaagatgcatcccccatcttgctggtctgtcacgagtaaaggccaggtaaggtggccagcaagggaccagggtcagtcagctctctgttagtcactctacaataagctgtggtgtttacagaccagccataagctctgcagtgcagggagaacccctgacctctaggagcagagaaactagtattgctagcctaaggcagcacaaaaaatccaaggggcagattgttttgatgttttgtctctgtccttgggagttaagagaagaggaattagattgaggcggagaagcctcactgtgcccaaacaggtcttctaggctgttgagagggcaagacagggcatccctaccaatggggagaactctctgaccaggaccttagaggtggagatgaagcgggaggaggagtcctgctggactgggcctgagatttgggtataggtcaggtcagatggtggaggataagaatgacagaggtagggagcaggctaagagaattggtatggtcaccatgtgcaagatgggtgggcactggaggctgtcaggccttgtgctgcccaggccaacctgagctgagcagccacacccatcctgtgccactcacctcttatggttcctggcctggacgtcagcagccccagggctgtgctgtggagccatttcccactttgcaagggaactgcgcggctctgaaattggaagtcttcccatgccacactgtattttttcttaccacactcatttattcattcaatgtctattgaccacacattatgtgtcagcctctgggcaaggccctggggatacagagagggaaaccacattccctggcccagcactttcgcttgtggtgtggaaaggcatacatccatctagagctggaaggccgggctagcgggggtggcgtgctagactagcaggcactccgggtctgacacttatcatcagtttgtggcttattggctttcctgcccctctccatgtcccaagagcctgggagaacagggtcagaggccatgtcatgctttgcccgtgatgaccttaagctgtcgtttagcctcagctagaactgtaattctctagattgcattgtttctgtatagaattgtgacatttcagtttccctttcttcatttaaaaagacacctttttttttttttttttttttttatgagacaaggtcttgctctgtcagccaggctggagtacagtggcctgatcatagctcactataacctcgaacttctggctcaagcaattcccctgcctcagcctccagagtagctgggactacaggcatgtgccaccacagccagacttttatatttattttataaaaataaaaaaatatgttttattttgtagagacagggtctttgttgcccaggctggcctcaaactcctggcatcaagcgatcctcccacctgggcctcccaaagtgttgagattacagcatgagccaccacacccagactaaaaggcagtttgattttacaaatcaaaatagcagtaatctatggagatttacttgtgagattggtaggaaacatcttaaatgtaatcaaacaataacttacatcttgatgaattcacgtgtaggtttctcttcctcagaagaaatcagatgctgttcagagcacgaaggctagaattttaccctggttctcatgctaccttgcacccaggttggatcctgagtacagtttttggcaggtgggcctgcatataagttagcaatgggggatacccagctgcctctcttcatacagctgaggttttggggagtcattcttatagcccctgggttgggcctagtcctgcaaatgaattcaccagccctaaagcccaaattgcagcctctgtcattcaccttccaggagtggaaagggcagtaagtttcatcttattattattgctattttggtggttttgttgaggttggtgtgtgtatgttagtaagataaagctctcagaaattacatagcatttgtcaaggatataagagggactgtgccacatctggctgtatagaaggtggttccatatctttaaatagagccccaggtccttagccaccagaaaggttttcaggggaagtgtgcaccctcagcagctgctgctggtgggcaggatgggcacgcatggaacaggctttcctctgtggccaggtgagaagcaggtggtgagacacagagcagtgctgggctctgcttctgaagcctccaacctttccttccctaggaagccccagagagattggtgagggtgatttcccaggaagacgcagtgtgctctgacttctgtgacagtgagcaacgggaccagtggatgtccagatgctggcaatgagtaggccttccctacgctgggtggcgtccacaccctccggcttccattgcctgggtctcctggaggtggtttgctggatgaataccgcatgcacagaggctggccttgggtttgaatatggcagccagtggacagcatgtgcttcagttatgagactgcccaggagatgcttcttccaaggcagagcacgtgcagagtccagtgctggagaggccgggtgcgcagttgacccatttccagttctgttttccctctcatgttcctctgtccccatctaggacatgctctggagtcagaagacagcgaaaagagaagcagaagccccggtggcaagagtctgaaggtgggttccttcctgacatgggcattgggctgcgcatgtgtgttcgcagttctttccagctgctgttctgacctctttgtgcagtgtatttatgtggctgtagatggatggtccaaggtagatttaggttttggaatactgttttttttttctacttcagggagaaaataacccagtttgggaaggacatttaaaaggggaaaatattaggtatgatggcacacctgcagtcccagctattcgggaggctaaggctggaggatcacttgagctcaggggtttcaggctgcagtgagctatgatcacgccactgtactccagcctgggtgacagaatgagacccgtctctaaaaaaaatgtaatttaatttaaaaagggaaaatatccttggtggtccttggaaccagcacttaccaggttgacccatatgaaatttctttcttgttgatgaaaaatagtcaaatattggcaatttcttatggttcaacatgttacagttccattcctctgggatggtagagggatccccagaaacacattttaaagagtttctgatactttaaccatttgtgttcctcttcatcctacgatacccttcacagaattttttttttaacagcaggaaggatgactgtagcctgtggattgtactgcagtaggaaactgtcctagcaaggctccactttgccccagcttcaaggtatatcgtctcaaaatgcaggggacttcagatgagttttgagcaccctttcttttattataaaaaaaattccagacagttcagccaatactgactaagggctgagaccagttccatgcttttctgtctccagaggaatttgcttccatctggatgcctgaaacggtattttacttcacctcctgtgtcaccggcagcagtcctgggagccctggggaggaggtttttgggagagccagctcacagcctctccatcaccttttagccaccccagtgctgggcagccagggtgtgggcttttgactgaatgcacttgccctcctgcattcattacaccattgtcagtgtgtgtgtctggggctgcctctgggtgtgcatggttttttttgtgtctgcgtgtcagtgtcaggctatgtgtgtctgtttctgtcggcctgtctaggcgcgctcagtgcaacaaggagctgggggaggtggcggtaaagaggaagggcatttcaaagcccagctgtcctcctcagggacctcaggagatgcgtgtgtgtgtgtgtgtgtgtgtgtgtgtgtgtgtgtgtgtatttttttccatgctgctcattgtgtggggctgcatgcgagtgtctgaccaggtgtggtgtgagcagccgctgggctgggtgagccccatctgccgtgagctcccagacttgccttctagccctctgccgccatccatggggagcctctcccttcgcagctcaccgtctcttctctaatttattagctggaaaggaggagaacatgaaacattgcttgaagacaatggccgagacagcaggtcccaccctgcacagccaccagcatctctcccctcagccctgtctcctcttctgcagttgggatctgcacatttaagcctgaagtaagaataaaacaaacccccaaaccaccctattaaaaaatgtgcctggccttggacatgcagaggtagctataaactgttaaaggtgggagaggtcaacaaaatgaaggtttgagccttcttctactctggggccccccacctctgagtcccagcacttccccccagctccaagccaggttgagggggggcaggggggcaagggggcccaaggcagctgcaggggctgtgttagtaaacactttcctgggttcccattttctttacaccccccacccttctctactccctgatgccccgttatacactcccacccccagcatccccttttctgtggcctgcacaatgagctcattgtcccgggtgtgatttgaataagggatcggtgggcctgttcccagcattgtccaaggggctgggaaaaaccccagcgcaggcaggaggaccagaccagacagagacagatgcctaaattagcaacaaagctttgtgcacgtcccctggacaagggctcgccttgtttgcgtggactcgagggtgtggagctggccggctgctcgcatgtctccccatgttaattagttttgcatgcatgtctgagaaggtgccaggggagatgtgtttgcctttccccgggagggggccctgtttgtggctggccagtaggctggggtcttggagctgatatgggctgggcctacctggggagccaggctctgagcctggctggggaatcacggctttcccatcctgtagttctgtctctctgacctctggggggcctggctttgctccctgtgccttctccctgccacccctccatgtttgaaagttggtcagctctgactactgggactcactggcttcctcccagacccaggccagtgcctgtccatctggcagtctgtctcttgcgacacagggcccctcgggaccgggcagcagaaacagccagtctggactcttctccgtccccgagccagatggccagtctgctgatcgcattacggcctcccctgtccccagacccctgccgcctgtggttggaccaggatcttgtgtgggatatgatggagaagctcccttttaggacctcctagaggcctggccctgaaaggaaaggggtctggtagacagggcgtaaggcatgtccttgctaccagcttctatgtgacctcaggcaggccaagtgaccccgactcctgaatcttagttttcttgttggcaagaggagtgagtggagcttcaggaatctcttggctctcttctagctcagaaaacctctgatggtggtagcagtggtgatcacttcaaaactgtgttgatgtagcattcactgatgtagcacaatgacaggaatgggactaatgaattctggctggggtggaggggagtgttgcaggaaggagttcatccctgttgatattcagtgtgggctcctgttttcagagtgtggggaggaccaggagcaggcagagcctgtcttcccaggtcttcacagaggagcccttccccatccctaccctgcagtggtgagaagcaggccctggcccagcagaagggagcttggcagtggcaaagaagaagctggagggatagcagctgctggccagggccctgggtgtgtcctggttgccccttgcaggtcctgggatggggttggtgggggtgggcaggggacagggctgagaagggtcagggttcatctggaaacttcagagtgggaactctccatagcccttcagaataaccccaggtggtgggtggggagtgggatgaagcatcaccctgctattcagtgcgggggtctcaggttcagcggtcagggtgtctggctccttctttgccagcctccccatctctggcaccctcccactctctcatcaggtgttgtgggatgtatcttgcactggggccaggcagctgaccagagccacccacaaggagcctctggaattaacctcaggtagccactcaggccaggcaggggagagaccctgggcctcccttccagcagggaccttccttcccatgctgcggtgccagccagttcccacatgcagtgcacttgttccttccatttgggctgcctttcccctctccgcctctctctctctttctatttctgtttctgggggacctctttttctacccctttccctgtctccctgagctgctcctaactcaagctggataactggtggtaaattccaaagctcaatgaagaaaagaggatagaagttagcgcttcatggcaaggatagagtgagagagttgcctacagtatcggttgggagaagaggcagggcagcagggccttgggagagctgcccactgccctccctgcccctccccattcctacctcccagggtttagccgcctcagctgtagctctgagctccttaatctggtgatccttgtggtgctggggggcgggctggcagaggctttaggaggtgacaggggatcttgggagtcgcactctgctaacagagtgtcatgcaaagctggagaatcacattccgagcgcagctcctccttctaaggcagtggcccggcagggctggacccagcacgggtggtgcccagtggagggctgaggcacaggccctgcacgcagtcgggcatcacctcctctttgtcgctcaagaggaaagttcccaagattagggctttctggccctttctgcatggctaagatttcattgtttggtagctgcccccacccttaccccagctcccaaatcctctggctgccaatcccagttagaagaagtctctgtaagtcacaggtatcatccccctggtcagctgttggggtagtcaggggtggggatttgtctagaactaagcaagtatgccgggtggaatggctcccctgcctagatgagaaggggagagaacccctgagatgaacccctgattctctcagcgatgggccctgagagaagccaggagagacaggaaattgaggtgggggtgcaaatgcaagcgcaagtggttctgaggcatccagctcagcagaaccggggcagcccaggccttggaccttggctggagggtagggacagaggagaagatgctgtgggtcgaggcccagggctctgcttctgccatgactctgcagcagaccctggatgtctcagagcctccaaaccctcatttgtaaaatgagcatcataatccctacctccattggagctgctatgaagactcttgggcacacgggaaacactcagtggggttaatttttcttctccttttcccttagatatggggcagagatgaaggagttaagcttctccaggtcacttaagatagctgagatttggggaatggggacagtggtgatattcagaatatttaaccacctgtacaggttgggcaccaaccagtcagaatgacacctggcccaaatcatcacccagggaggagggcacagctgagcagaacttctccctatatctttctgccccatcatgagtccatttatcagcaagcatacagacatcccttgagggcagctcctgaggaggttgcaggatgcgggatcctgagatctttgcattcaagcaagtcaggcctagcatggggcaccctgcctgacctggaagaggacccggaagcagagggcagtgagctgagggccttcccagctcctgccccaagctggcagcagacctgccaccaggctctggggaagagctgcttctgtgggctttcgccatcctcacgtcccctagagctgccccctccttcctgtcccttcttctcaaaagcaccatgggtcaggattagagggtctgtttgttctctgatctaactcctcgtgcctgtttcttcatcagcctggggaagttcatggtttctgttatctgactgtggagtatgggagtgtggtgttggggtagtgtggagccatgttctatcatcatggaaagattctggcctcaaggcaggcagcgtcttcccccagccccaggctttctgaggccacacctggacacgtggtgcacttagccaacactgacttattttacctggcctatctctttgccttgttgggtgaaattaatgcctttgagggcctaaggtggtctggttaagtgacaagggcataggaagacacaaccttacctagctggaagtcagagatttggactctagcccactttcccactgagtggtcttgggcaagccacctcctttactggatccagaaaagtagcattgagccaggtgtagtggctcacacctgtaatcccagtaactggggaggctgaagtaggaggctctcttgaggccaagagtttgagaacagcctgagtttgagaacagtgagaccctattcttaaaaaatgaaaaaattagccaagtgttctggctacctgggaagctgaggcaggagaatcacttgagcccagtagttccaaggctgcagtgatcataccactgcattctagcctggatgacagagccagatcctatttcttaaaaaagaaagagaaagagaaaaaagaaaaggaacattgaataagatggtatctgaggtcccttttagccctgcattttttcatctgggagttcttcctgccttttctactctgttacctgccagtaacccctgctcccagccccctggctcacaggaaacatagttagctttgtcccgttcaagctggcctgggatgcaatgaggcaccattacctagaggctacaaaaatgaaaacccagctcactgctggcaagggatgtggggctgggcagtaacctgtcctggagcaagacttgggcagagagcatgagtctcacctaggtgcactcccagcctctaatctggatgcctttgtcctttgttctacttctgtttgctctgcatggcatttgccttggtggctctgtttgctcaggtggccctcaaggtgggtttgcagtgctctctttgggatttgtcccattccacttccttaggccagaagctttagactcaaaagctccaatccctgagaagcaaccatgggggaaacactactttttggtgctgacccctctccgcagcacccctgctaggaggctcttccactggtacagctgatacatggatgtgggctcagcatcttatatgactggcatgaccttgggccagctccttagcttctctgatcctctatttccttatttctaacatgaagataaccacacctttctcataaagttgcagtgaggcatagaaataacacagataaagtaccttgaaatgatgttctctcttaccttctagtgccagctgcacccagaggcttcaaaggccacagacataaacccttaactttcctgacctcttgcctttgagtttcaggactgccctgctggggaagtgctgagacaaccttggaggagctcctccccccagcccaccgcccctccttccccagggggcagaaatacctagtttcagccctaataatacctgaatgagatttataggacaccttcctccccagagtgcaaagcttctcacatattatttctcttatctttagattgtcctgtgaagtgaagtatgatcggacagcctcttttcagcttttatgacaatggagacagaggaattgtggctcttgccaaggtcacaggattggaatacagagccaagccaccccaggacatgcaagagcctcagaagggaaaaaagcccagcaggaagggagaacaagtagcctctgtcctgaagttgtaacagccaggggccaggatggaggaggaggaccccataatctgcccatctgggacttggcaggggacctgggaaaatgtaccccaacccatcccttaagggcctttgtctttggcccattggcctagcatctacttcttcaccgtgtctgttcttgtcacacctagtcaggtctgtttgggtctgaggtgcatggaacattctgggtaggcctccagcaaacggaagctcttcaccgtgtttccagcctgggaccaagggcagcatactggcaaagttgccaaagcaagggactccagcctcttaggagttaatgactccctctccccagctgtcctccccttggtgctcctcttcctccctcctcctgctcacagcaggcagggcctagacccgggagccatgctgctgtgctgttgccaggggagcacggaggcagatctgagctatgcagggaaaaggcccagcctgtcaaagtgtctgagatgaaccgccgccgtccctgtgcagctgggctcagacgtgtctcagctcttgttctgtgcctgagaatggcgaaacccagtgaggttcaagggcaaactcgctattcattagtcaggggttcttgacgtcccgtctctcccagggatgagttcccccctcctctttctccccctcctatgacacattcctgggtgcctttggtgaggactgcacaccctcctcctgcctagccccctctccaaaggcccctgaataaactccccccaaggagaccaggcagggcagagacaatggctgcaggaaatcattcaggcgggacatgctggcctgccctccacccagtccccctgtgggccccactcccttctgattcagggcacccttgggcccccagcctatacaggcctggacaggaagaaaccactgggaaccaccctaaggacaacatgctagtccagtgccattcttcgctggctctgtgggtgcctttgtggcctgtaccgactggctggctaattttgtggtttctgtaccatcacatgcctattttaagacactctccagcactgtcggttagggagtgtaaattttgcaatattttctgaaatgtggcaatatcaaaatgtaaaaggcacacatacttggtcacaaacaaatggcactatttactctgtgggcatatttgtaaaagttgccaaagaattatatacaaggatgttcatcagagcatttcttttgaagagtaaagaaatggacatgaacctgtggtccgttcatacggtggaatacctatgcagctgtaaaaatcagtgtggtagatctccgtatatgagttgatgtggaaggttggccagttcacatgataaggtgaatagaataagttacagaacaggctgtagagtatgatcttatttgtagatgtttaaaactgagtcataagtatgcttatatacagatcgtttctggaagtatgtactggaagtctacctctggggagtggggatgggggagtgcactcttctatactgttatattttcttttcatgctcctaaggtacttttattggaagatgtaaagcggttcaatgtaataggcttaacttctgtcaactaagttggcgtgggtgctttaagagggtggtagtgatgttgctggagaaagtatcccacagtcactggtggcttcagccacgggccattttggggcctaataatcacatatcatcatggttgctagtgttaatcgaaaacctactaagtgccaggcttactgtctctgggtcttgcttacgtggatgtcatttttccagttgcaccaaatcgaaagaggttaattggtttgttggagttcctttgtaggtgaagggcagagccaggagcttggctagggacaggggaggtgagtgggggatggtggataggtcttggctcccagtttccttctgggcagacattgcccctctgccctgaggacctgcttgtttgggggaagaggcctttagaggcaccagggtcatgccaggtgttggacatggtgaactgggaagtgctcccatctggccacagcgcagaagtatcaccgtgctgggggatggggaacagggctgtgaatgggcctatttgcataagcagcatgtgtctggagagaaagacatcacagagcagaagagtgcgggtgcccaggagtgcacttgccacccctacttcatccctgaaagagtaaatggcctggaaggtgtctctgagaggtaatgccgcacaccaccctccctgggggcagggtcaggctacacctgccttaggtcgggggctgcagcagcctgagagctctcagtagggcctcagtagcctgggagggagcaggggcagggggcagggaaagaggcgtaatggggctgtccagaggggcctgggaaacctggtccctgaggcctgggcacagctacaatcacttcaaattggctgtggggccagtggactgggaaggaaaaaagcaataagagtgaccaagtgcagaaggctgtcaggtcccaggtcacatgccttagtgcagtgactcctcatcattttatggggtgtgggtgtcgttggtacacccattttacagatgaggacaccgaggcccagaaaagttaagttacatgtcctaagtcacacagcttgtaagtgccagaactgagatcaaaaccaagtctctttgactttaaagtctgtactctgaccccaaagagatcctgtttggccacttataggaggtccctaaagctgcagactccccttgccggcacccacatatagagacattaacccttcccctgcagggtcacctcaaatagtcttttagctgggcttctcctgcaattccacctaatgccatcccctgggttttgcccaaacctgaactgggcagtggggtgagaggaggggtttacagggttacagagcctcatacagataggagcccatggctgctggtcatctgcattcctgcaggattggctgttccttggggtccttggcaggaaaatgaggattgctccgaggcctgctccagtacttcccagaggctggcctggtgtggggctctgggaaggctgaggctggagaagcgtaagtaggagggcagagatggcactcaggtagcttgaatcaccaggacccttccaagccccacaggttctgagggagtactagggccagctctgggagaggtctcttcctatgctgtgaaccccctgcctttcttgcagcctacaacgaataaattttctttgcaaaggcttccgtgtctctggtcagtttttctaggaggacatgagtgaggaaagtagcactccgccaccagcaaaaacaactgcttgtgtcttgcggtgtggtggggacactggtatgggtgcaaaggatggagcaagaagtcttacaaggctgggaaagtctgtcttcttgacctgagctagggtcatttgggcaagaagtgaaggtcatggccagtgcaaggcctaccttgccttgagggtgccctgccctcaggagaggggtcctggaggttctggattgggagctagcccccacgctccttctcaacctccatcagtgtcttctcatgtaattctcacaatgaccccataagactgaattctgtcttatagactaggaaacagaggctcagagagacttaagaaataggcaaagccacacagctgggaagcagtggagtcggcctccagatctcatctctgtgaccagaatgggatgcagggggtggtgagtctcttgaaagccgctgataagttttttcatgtatgagcaaattcacaaccctgctttcatcacagcattcattctcacaaggcctttggactgcagagaataatcaggacttactgtgccagccactattctaagtgctagtttgtgtattaaatcgtggcttaatcctcacatctgtgtgcataactgggcactatccttattcctatttaaccaagaacgagagtgaggccaagttggccatccaaagtggcccgtgtggctccgtgtgtggtgggggaggggggattgcagccaggatgccagcacagtcacgtttgtctgtccagatgccaggcacttaactgcacacactacctccctaaaggccccatcaacctagcccgggcccacgaccccaaatgaaacatctttcactcgccccccagcagcccgggccgcgtttgaccactagtagggcagaaccactgaccggcaggcggcgctccccggggctcccggctcgagccccagggcaccgggaggagtaaggaccccgagcgggagggagacgactggggggcgcgcggcacaaagagctttttattcaaatttgtttagagtttcgcgaatttgcatgaaaaatgtgtgagaaaagccagctccggtgacctcatccgcacctgccattaacgttcaattagcggctgaatagcggccgccgacgcgacgtgcagagaatccggcctgccccgcgcagcgagggcggcgggccaggcccgggatagggtgggaccgagggagggggacgcggcgtagggccccggcctactcctctggcccggagacccaggacctcgtccgcactccaactctccgagggaacgcggggatctcaggactcacgagcccaagattgtttggagcgcgccgggagccttaggatgcctggctccctctgggcgcagaaaagggcgggcttgcctcctccccaggacggaaggtggccggaagagccccgtcccagctca

SEQ ID NO: 374 - DNA, 63082 bp, Homo sapiens
  source 1..63082: mol_type = genomic DNA
ccaggcctggtggccctaggacactcttggccacaagaattcagattattttctcagcaaatttctgaccagtgtcctggggcctcagcaggggcagggctgcatggtcctgggtctatctggacttgttctggctcagacctcagcccaccacaaggacaacgagtctgggaactcgggcaggctctctgccaaccaggagctgctcttgctcgccgggaccccacagggcaggaatagtgggcattcatatcattcccattttgcaaccaggcagaccgaggcccagagaggccagataacctgcctcaggccacacaaatggcaaacaataaggccaaaccttggtgatggccagactctaaatccggggccacttcttgccttaggaatatagtctttcctggcactcacttagccaaaaatctttctagaagggtggcaggccttcctgccccactcccggaacaggccggctgctttcagggccagaagagccagccctttggaggaggaggcttgtgagagtggggatgggccgcagagcctccccaggcagggcagcgttgcagcttgcatgtggcagggatgtagggtgaagctgtgcagggcaaaagacaggtcagttcccgctggaagtgccccactggggggcctcggtgtgtctctttccccagcactggcatggcacattttgacctgagcaatggtgagctgcccggaatacgaacaggaggaagagaaccttccccaggcagcatgtgaggctggggtggcactcgacacaggacagcaggcaaggacatgccgccctccaggctgagggtcttgggagcctcccctcccagcccctgctgtggcctccccctgggccctggcatgggaggagttaagctgccgcgggcaccttggcacattgcgctgcccagagtgtccggctccccacccccactgcttttcttcctttttgcctttttccttcttaattaatcatacgctgctgcccaatttaaatatggaaatgcccaggccgaggcgatgcaattattcatgagggccgggcggctgtccggggctctcgggctgtggggagtaccgtggcatcgcctccgttctgatgtgtgtgaaattatgtgcacaaaaggcgcctccttatctgggagtgtgaactaaataaataaataagggcttttgtttgtttgccggctcctgcacatggctgctgggactcaagcgctcgtgttgtctgcgcctctgtgggactctggggacgggaggcaggggaggcccccgcaggccggccaggggctgggggctgggggccgggggccggccgccgggcacctggggccctctccctccccaggcaccaccctcaccccgcagctcccccccatacacaccctcgctggaaagttcgccctgcccgggctgggctcccaggcagcctggcaccgtgccaggctcgccgccgagctcgggcagcagggtggggcaaacgcggagcacggaggacggggccgggcgacctgggcaccagcaggacccgaggccaggagccaggggcccagaaggtgagggcaccccgggtgggcgcagggtgggcgctctgtgggcaacgggccctgcggccgggcccaggagcaggcctcgttgcggggttggggggggaggttggagcggaggctggcagaggaggcaggcacaaaggagggcagtgccaggcagctgtggccgacgcaggcatcgctgcccgcctgcccctagccggcctccccgccgaggggaggacgcgtgtgcaggggcccgggcaggagcggcagacaccgagccgcggccacagggccagccgcacagtcggaggaagggccggagcgaggcggggcccggggctgtcaaggagaaaaacatcccaaggcctgcaaattgctgctctcagcttttttcccccctcctcctgcttcgcggggtgggggggttggggggggggtggtggggggagaaagcagcgcttcctctggaggcggatgcaaaaaggatgcagaattttaaccatctcctgcaccggcccgtccttcctgagcagggtttgggcccaggcctggcgccgtggctccctgggaagggaaaggccagagcagccgatgccggttctgggggacgccggaaagcccagcctcctctgcacctccatccagaaccgggggccccgcagcacctgcagcaggggtggagggtgggaggcagaaggggcctggtgctctcggaggctgcacctcacggtaccagtcgctacccagagcagcacgcctgtttgctggcctgctcttgggtgttaaacatggtgtccaggtccccggttggagaccccagccctgtaccgggtgagggtcttagctcccactgacttggggccttcaaccacactggcatcccaggccttcctcctgactgacttctgttttaaaaataatgtggaacgttttctggcatctggtgagggattcacacactgtttactgagggcaggacttaaggaatgagttcagaaggtatctatctggtcactggacaaacggcaggcaagccccctgtgctcctcgctgggtgagactcaggggcatgggtttgggcatgggagctcagagggatggtctgggcccacaagcccacgaggcatagagcctagggcccatgaaatgttttcattttaatttcttttaaaatcagaagaaaaaatgactataaaaataatgaatatacgacaatgaattcgacctggttttattggcctttagtctgatgtagtcataaaatagaatttttagtatttatggaggaagggaaccaggaagccaaaagtgccccggcccatggaaggcgggtgtggcctgggttggtcctgtctgtcccaggacaaagggtcagatgtctgggtccagggggggtttggagggcatctgggtgccctgtgaatctggcttccacgaaggctagctgggacaggttgctccagcctgcggtggacaggagccagggctgtgtatgtctgtgcgtgtccgtgtatgtgcacgtgggtgtgcaggcatactcgtgtgcatgccagtgtttgacaaaggattcctagacacctgcgtgtgtaagtcccaattctcaaaacggggaatgcaaggccagggtcaggagacagtgtggctgcaagggcctggtattcctgacaatgatgggtagggagtgccattgtctccctaggagaaagcagccttcaaggtcccagcacccccaaacccacgagctcacacaaaacaacgcgagccacaaatgcaagccacatctgtcatttaacaccttctaatagccacattttcagaaagtgaaaataagcgggtaagattcactttagtactaaaattcattttaatctaatataaatttccaaaatcctatttcagtgtgttgctcgtatgaaactgtgaacgggatattttgccattttttccatattcgatttggcctctccccatttcaatggctcctttgctgcgtgtggagcagctaccacggcggtcacgtaggtttagtaggtccctgtgccccccacttccccacccagagtaggggagactggttttctgcttcttttttgctggtggcccttcctggccagggaaagggatacttccactggctcatcagcccccagcaaccctgagagctgaaagaatggatgttggggctgcaggttccagaatgaggggggctgctggaaagggttcttcggctgtgctcccagacgccaggggacgacacaaagggctgacttcagactcacaatagtggggcggttagtcacagtgccagggcagcgggcaagcagacagagccccctgtgtctgtgcctggtcgggctgggccctgcagcccccatttccccagctggcttcccaccccacccctgcccgctccccacattaaccccctgccgcctgctgcctacctggcagcctggccggggctcccttggccaggactggtttccaccagccaccctggccagaggcgtgctccttctagaagccgggctcaagcctgcatgatttcatgggcctgtctcgggaagcaggcattggaacagctccgtcaccgtggccgggcagcgtccacgcagcctgaaaggggagattttcatattagtttagaggctcctcacttaaagatttcatcagcatttgcgagtgttcgccattcaaggactgtgcatttctggaaacaatgaaaagccaaaactgtgaaaaattaaggagtggccctgaagctggtgtctgtaactgcacattttaaagtgaacagactgatataaatattttaatcctgtgcctagatagatggataagataaaataaattagtcatgttctggcccagtctggagactatctgaaagcaagacaaatgtcagcatttgctgtttaggggttacaattaaaatctctccttctagattgagcttctagagcctcagagatggaattcgccgttttgccgcgatttggcgttaacttattgacccatggggaggagggtcacttcccgtgaaaaggtataaaatgaagttgtcagtctctctttttaattaaaaaaaaaaaaaatctctgcaaagattctgcattctggcttctctttgctaaattaaagtggcatgtgtttttattttagaaggcagagatgttttgctgtgcccagtgtgaggaagcgaaggaaaagaaagatcttttgaaaatgtgtacatctacttgcagcttgaaaattccaagtgccagacatttttcttggaggaaataaatgtcttcaatttattcatcttacctgttgattatgttctgtaatgatttattttataatttaatccttgtctagaaccgaggccatctttggaaagtaaaagacctaggtctctttggtccaggagacattgtggccctctcttaaaatcattgactgccgagatctgggcccaggcggctctcggactgaaccggtctgtgctaggcagcctggcccactcggccttcaaaacacaagggatgggagacatatgctcggctcacatcgttttgttttgatttattttaaactgcttaagatgattttagcacaaggagtggtgtatcttacttgcattctgagagccactggatttgcaagctagagtacaattttttttttaatccaaatttagaaattgccttttagagtagacaacagcatgctactttgccttttaactcacttttaaagaacgattcttaagatcaagtacattgaatttggagattggtccccctccgttattaggggctggaaatggcccacttttcaaaaataaggtcagaaaaggggtgtttctgacctaagagttcttccaggctgggctcgtaccacagagattcttccacacccatgtcctgagtccttgtcctacacaccattttttcttccaaggagaaggagtgtggcattcagttccagtgtcatcgtgtggaaaagagtccctgcctggctgagaaactgtcacaggcagccgggccacttcccagcatgacccacaagcccgatggtgcccctcgaatggttaagggacccgtacagataccattcttttaaagcaagccaatgcaatcttcacgaattgcagttccaccctggctgctggtactaactctaataatggaaaaaaatttaaaagattggggacaacaggaaacacattggatccccaggggaaacggcctggaagctacagtagagacatgggtgacccaagggctctgttcaagtcctggggctgttccctttattcctccaagcctcagctccccggatttaaagtgagaacagcacccagcccagcccactgtcaagggctgttgcaggaatatgacaacagccaccaatatttgcatagcagagatgcccagtttcgttttctatttgaaagtttctctgaagggggatgtgctagagacacgagaacaactgctaccatcttaataacttttctggcaatacacgacgatgattgtttatgttaatctcataactattaacaataattcatttcattctcataatgaattatatctatttgacttataataaatagaatcatatcagtaatatagtccttttctgatcatgaaagcaacatatgctcactatagaaaatttggaaaatacagaaaaatgcacataagggaaaaattattcatcctttctcccacgcagagacaagctctggtcacattttcctgtgtttccttccaggctctgctctctgccgagcggctttcatcaattctcctagcatctattttcagataactccgtgggcttttgtgattggtcctccttgtcgccttggcccctctggtcctcagtggcagttctttctctcttgctgcctccttcaggagggcccggctcagggtctgggtgttcagggagaagacctcaggctccacggcacccagcctccttgtcctgctgtgctgggagcccggttggggtagcccagatacacggccagcacagccccacggcaaagccaggcctgcaggtgggctcagggcatcagggagccggagtgagtggcatgaaacccattatctcgcagggcccgagctgtggaggtgagcgcgctaggccttcccatgcaggagagggctgggaggtgggaagatgcaggcaggctgtccccgacagaaaacccaggaacactgcagcacggattgggaggggggcgctgagagagtgtaaaaagcagcttcaatgcttgaattctaagcaaagaaagatgcttgggccaaatcaaaccgcttcttagacgtgcaaagtttcatcggaactgttgggataatgtttccaaggtgttcagctttatggccctgacttacacccgccgcgtggttgggggttagtgccaagtggcttggtaggcagaaatccaccagaacttcagtgcaagggcacaatcccccaatagcatgtcacaatcatgcatgtgccttggccgaccccacaagtccatcaggaaaaagttccacagaaccaggcctctggagggggaaccacacagacctccctattgccttctgagtaactgatccaaaggcatttctagaatagccgggtacgttcatgataggagaaatgaagtctatggggtctacctttacccgcttagaataatgcagtggcctcaacgtcttaacaatagatcatttgagatttattaataacccaagttgcagacaaacttcataggcaagatcataggttgcagtgttcactacagtatacaaatattagcaagacatgacatagggaatcataggggacatgacagtaaattatcccatagtgaaataatggaacattgtgtcaccgttaaaacggtggtgacattttgggaggccaaggcgggtggatcacctgaggtcaggagctcgagaccagcctgggcaacatggtgaaaccccgtctctactgaaaatacaaaaattagccggacgtggtggcttgtgcctgtaatcccagctagtcgggaggctgaggcaggagaatcgcttgaacgcaggaggtggaggttgcagtgagccgagattgcgccattgcactccagcctgggtgacaagagcgaaactccatctcaataaataaataaataataataaaatggtattgacaaaaagtttggaatggtatgggtgtgtacgggatacaacaccttcctacagtatgtacatatgtaaggcatgtctgtgtatgtatatgtgtgctgaacaatggttgggagggaaatacaacagaatattatttctggattgcggcatgtaggtgaattttcctttttttgtgtattttatacttaacccatattttttatttactactgaaattatatcttaaatatctgtctttatattttattcttaaattgcgtataatttacactttcctgtgccttcattaaacacgtggtatatttataatcagggaaaaactatttttaaagactcattataggaagatagacaaatagagacaaatggcatgctttctttcagtcattggggatggatgatacacgtagcagaagtattcgttagaccaacaaataggaatagtaagtcaatattgttctttctttaataaaagatttatatgttggtagcttattaatccaatactatgtgagttttctaaccaaacacatatacttgtacgccagggcagaaaaatctcaattaagattttgtgtggactcgggaagtgtttttgttccctaaacaatagccttaagaagggtggaaaaaggcccgtcttcttcttggatccttggttgggtgacaaccctccggtggtgagacatggtgcctgattttcagttggggctttctgcttcccctgtttggttttctagggacaatttaaaagattctgcaagttaattactggagaagtccgtagatcctggattcatagtatcagattaattgtggtctttgagtgggaatcctagtggtttatttagactcatcagttgtcttattcttttttttaaaaagaaagaaaacatttattttcgtaagcttgtattgcccttaaaatatttctctgcactcttaggtcacctgcctattcacgccaggagcgcatcgcttgcgttaagagactagaagtttctttcttaaccataatgtgccaggattttgttatacggaaaaatctgtccgtgtttccaactaatatttcctagccttcaggcaagtgcgacttgcttcactgtaaaatggattcccaggacctgccgtatcgggacgggcagaattctttaaaatgcagtgccccgggcaaccccatcacttcccggctggctccgggcggtcccgggctgcccgccggccgcagagccccctctcccgggcccgcccggccggagcctcagtttccccggcagagcggggcggaggcgaggctggggacgctcgggcggcggggaaggggccgactcggccaggcgcgcccggctgggaggtcccgcgggccctggagcctcccgcagcccgcctgggcctccggggcgcgaccccctaatccgctttagtcaatatcttatgagctccgcttgggcaaagtaaacaggcgccgaacaaagcggcggccgcagcccgcgactcctgaccccggggtcgcgccctttgttcgccctcaatggggcagccccgccgcccggcctgcggctaattggggcgcgtgccgccgcctctgcccggaccgcaccctggactctgcctgggacgcgccctcggacgcaggccccggacccgcccgccaactccgacccgaccccggcctgggaccccggctcgaaccctcgtccctgcccaggcggaccccggccccggcccggaccctctgcagcggctccgggcccaggctccgactccaggcctcggttcgaaccctggggacccgccccgccccgctgcagaccggcctccccgcccgccgcggaccccgagcctcaggcctggtgccggactcggccctgcctcgcgtgcccgccctggggctgcctggaggaggcgcaccgaggcctccctgccttcagagccgctgcgggcctgggccctgtgtccccccaggtccgcagctggccggctgaaactggcccgcacctcccgccccggggccgggtgctcctggtccgcgcaaggtccccacgcactcccgcggccacgtgggtgcctgtcccctggagcggggttgggggaggccgcagagacactgctcccggggtccctgtgcaggccccgtaaggatttcagacagccgtgatgcagaggagacgtgtattagttcttgtttttctttttctgctctttatttctgcttggaagcctgtcacacgggaaagaaaagacgctccatctatgcgaaccccactcccctggtgagggaagccggaacccttcagaccctctgcacgtgggctccctccccgacaacctctttttcctccacatcacaacctttccagcacctgggaacggttctaggccagaggaggatgctgaggccatgaatgcatccgttgacacgaaattcaggccttgaccatttcacgtctttctgttcttcgttttttcctcaaatgttggacaaggttataatgtttatcccaagaagcttttgagacttagcacttgtaattttcgtaagggttctgtttgatttttaaaaaggtactttcttttgtaattaggtgcaaaaaggaaagcacagaaaggactcttcttgaaagcctttgcctccaaagatgagcagaaaggcttccagttcctggcaccgccaggcaaggccctctacctgattctcacttatttcagttttgttcaccagctgtaaatactgctaggctttgccaggaagacttttttttttttatgttgagtttgtttttgagcttgttgattgcacggtggaatattctaacgtggaatttggctttgggaagacttggtgttcaggagttgtcggatatgccctgctgttgtgaggatggagctgggtaggggtcctgccgtgggccatgagtgggggtaggcaggtgtggccgtcaccttctgggtgtgcggtgcagatctccacctgggaaggaaagcccttgggagacatgccttgtgattcttgcctttcatagaatgactgccaaatagcccggtgcctctttactcgcctgcctcgttcctgtgcatccctcctgaggtcaccacttctatgtagcctttctcctttctgaggagcaataatccaatctgatcagtgtaagtttgcctccgtggaatgctgatgcccaggctggggacccccgccacccctctctcagcagtgcttgcaggcatgagatggtgagggttctcaaaggctgtcctcaacactgatcggcctttgatattgagaccatggggcagctgcctgccaggttcacagagggctgtaagcagggatgaggcttaggtggggcttggaaccaccccgggtgcctggccagggaggctctggttgcagggactggcagcccggcagacgaggacagaggacggggttattgtgctctttcagctcaggcaaagcagctttgtgacaaggactctcgtggggcgattgtgtctgtgattttatacccaaggtctatttgccccagtctaattctaggggctgatcaggatgcacctggcagggaaagtgggcacctcggacgatggaagccactgcagggaagatggggggagagctcccaaagccagaccggcgtaaggcatttctgggacctaaatttcaatggggctctgttttgcctggaaactgttcataaaataaaataagcctatgtgtgtatgagtatgaagggatggatggtgatgttttccttaaaaaaacaaaaataacaaagtgcatgtgtgtacacagcagtcggggtcccaagtctgtgtggtatcaggcctagtcacggcaccactcacctgggcctcagtttccccagtctttaaagagctaagagagttctcgttctgtctgctgcacgggccaggagagtcacgtgaggcgaggtgagaacacgttgtgtaaatgatgaagtgtttgctctgcacacgtgaggtgctgtctttactaccttagggaaaaaccctctactctgaggccgttgttttaggattcaaatggttagtgattgacatggtgccgggcacttactaagtgatcaggatgattttgttgacttgaaccgtggtgtcaaaatcctctgcattggctgtaagaaagaggtgggctgagcacggtgagaaatggagtcgaaacagagagcatcccaggcctctgaaggccttcgaacatgacaacgagttggcccccactttgggggattggagtggacggtttggagatccccctgggacatacgcctgagagccctaagtgtttgtcccggggtccaagcctgtcgtctgcagcccttcattgccctgcctagcttggactgcgtaagcgtctgctgggcccaaaccccagcccggtccacacacttgggccatctctcctgggggaccggattgtgcggcctccagagctgcctggcagagggcacaccttctcggcgccctggtgccgcaccgcgccgcgctcccaacaccggcttgcttatgctttgtcctgatgatgatgaatgaggtcagcctggcttaccattcacaaaataattctttattgcagagaaagcttttctctatctgagatctgcccttgttatctacagcagttatgctttccctggcttttggtgtttgcctacgtgtaatgaagtagggagtaacccagggagaacgcaggtagggcctgctccttcctctgggctaggggcgttccaccaggccctcaatcagcccccaggccataaaggcaacaaaacatttatcgctacacacaaacctacatatacacacttatgcacacgtatacatatgcgtacacacacacacgtatcccaggatgctatcctcgtggagctaacatttgatattctaagtattaaagtttgaggcaccaacaggctgtcttaaaaggctcattcagcctgtctgccttggagctattttatttataattcttcttgtcacgtcaaagaactctgtgtttcttgcagactgtgttcgggtggttgagtgtttggtttttggctacagccggttactttttccgaatctgtaggtccaggtgtgcgttgacaaggtttttcccaactcgagaagtttctcagggagccttggagtccttctataaatttctggcattctacgtgtgagagacttccagttttggagaagtcgggagagtgagggaaggagcgtgcggttctgagtccgctgcctcctctcagacagaaagtcaacgggcagcatcttgcagtatatttagaatgcagacttgaaaaactgacggataagatattattagcaaaggtacaaacctttgatgatattcaaaaacccctgcctctgtgcatcattgaaaaccaagcgaaaaaggagtgaaaatagtgaaaatacctatccacgtctctgattactttgaaatcgattttaaaaatatgtttatcatgtaaatattatgtagactttcattttcaaggtcagtgtcccttcttgtctggttgcttacagtaccacttttttggggagttaaaaaaatgaacttcatgttcttttgaaattaggaattataccaaaagttgcctataaaatagcaagaaacaaaaaagcatcggttttcttctttagcattttttggacagcaactaaatattgtcttgtagtgataagttcagttcaaacacttcttgtatttctgtagaaagggtgcctatgaaaaatctgaccttaaccttgaagttaaccaggtctaaaagctaggatactgggacatagtcaggaaaatgaaactggttttatatataaattagtcacctgtgttgtgtgaagtcacatttgattttttaaaaataaaatgggagtctctcaataaataagaccagtgtggtcaaatgccaaacaacttgtaattgacaatcccccaaaaccaaatcccaatttcagtatgagttccatttgtgggcagcttaagtttgttgtagtaattttaaagaagtaatctgtgaaatcttgattttagtaaaaagttcctgcagtcccttgcaacttaacaacaaaccatttgagttcaaaatcagttttttctcctttcttttttttatttattctagaggaatttacctagcccgctgaagacctgtacaataaaatattataagtagcacataaactttttagaaaaatgttaatttccccatttctgattattccatttaagaaattgtagaagtgattgactaaaattaattcagcacccacttctggaatggtaatttttgttttttaaaaatttagtttggtgccctttctcattcctcatttaaagtcagaaatctagctttggcatttgatagatgcatatataaccagagatattggcccgtcatccttaatacatattttcagatttgtgttgttactactttggaatggaaaacattaatcgtaattcctcattcctaaggggaaatttttcatactagcatgttgtttattaatattatgtacaatatattcatatatgattgaacacacgcctgtcgtagacttctagttgttttatgcgctccttttgattgaaaagtaataattaaccccttaagaatgctttcggggttgttagacttctttttgagatacatacgcaggcaccgcaacatgaaacatgaatgtgtagacttccaaagcatgttaaaggtgacaaagcgctgcttacacaggtttagaaccagacatgtgattgcacgcgtgtggagctggcaccatgaaagcacgatgtgcatcactcatagaggcaggcacacttaagtatgttctttacattgaaacagaaaggaaagaagataggaaaaatggtgccagcacgctgggctttttttgtttgctgttttgggtggggtgtgctagtgcagtgtccggtgtacgcttttgtcctcaaacaggcttgttccccggtcagagtttcattattgttgctggtaaacaaatgccaagtttgacaaaaaacagtgaaataaagcaaaagattttgaaaaatgcttcatcatgtcagaaggaaagaacccttttcacgggtgcctgcccacatttccttgcccagcctgagaccctattgactttgaattatcttttgctgttttatttctatgaaaattataaacgcgtatgttcgtccaaggtggattgatgcttagaggttgcgtataaataactgagagtgaaaataaacccatcatgcggtaggagcgtatgttgtcatgaaacaggcctatgaaaatggactctcaaacctgcaaactactttgaaacaaaggcaaaagaaaaaaaatcataagcctggtttgcctttatccagagtccccaaagctgctgagcagctcctcaaaaggcacattgtctaggatgatcgaagtggcatcttatccaggagccactgaaaacttgcaatctcaagtttattgggctggctttaaaaacatcattattcttggatgtgcaactgaatgttcagaacccaagtgaaaatgtaatttttcactcactcgccgtccttgctttaattagattaaatgcatctgtttcctaagtcctcataatgccttggatactgagaaatttaaaatgtcgacccgttgagaaaaaagaaacgaaaccgaagcacccccctcagccttctgaggctggactgtgggccaggggctggcggagaaagcaaggcagcaggaaattgccggctccattcccattaggcggatctggggagaaatcaggaaaaaaataactgtataaggctgacactgtaaacatcctagtacagcagcagccttcctagaccttattttcaaacatctgacctcaggcatggctgtggcccacaggcgaaaaccaagtttttcttcctggaaacttatccatcacagtgctcatcaacaatgtaaattttccgggttttcttgttgataatttgagcatactgtaaaaaatattattatttactttgaataatatgatagcaaatagacagaaacaatctaacctgaataatatccagtggaattacctgagtgctcttatttttgctgaataaagcggcatttgatttctgaatttgcaaccaaattatatgtaaatccttgccaagtacaggggaaatttttttaaaaagagtgtgtgttcttgaatattgttctgacttatctgatttcctgctttaccaaataaaaattggaagtgggaaaaaggcattaaattaacttattacagtgagagcaagaaaaaaaaatcatttaataaaaagaaggttagcaagccagtatgattatacaatgatttcaggtgaaaattacaaagctaatatcctggcatttagtcactgcgttcagtaatgatacagttgtcaaatttgtatttgtgccaatggaacaaaacttgtaagtggcataatagaagataatctctttttctttgtggctttttaaattcaatgttttaatccatttaatcacaaaacatatatcacattagttataatatttatagtgtttaggaacgtgattataaatacagtgtggttgttgggtgtagcctttttttttccttttttcgcttgaacgtgtatctccgaggtatgcatcatttctagagattgcccttgagaatagttttattgagaatagtaaccatatatttatgttcagaatccccatttggtcgttaccggctgtgttcattattttggaaaaacaagattccatattaaaaggcctggtgcttatgatgtttagatctctgcattcatctcagtttctaaagcatttttgttcttctggagtccctaaacttgctaaaccacaaaatatctgtagtatgttttttaaagtagttgaaccatacagcaacgatggggtacaggaggagtttatagagcagttagcggttgagttctgccttagtgtggctgggttaggaggggctacaggggcatatgtgggactttgggcactgctgggcacagactcatcctgtgggaatgtgtgctctcaccccacacttcctatttggggctgaaaattttaatagtgaagaaagaaaatgataaagcactgtgctagacaggattgatttcccctgctgtattgctagaaggtagacacggcatgtctgcgtctcaggctgccgagagagccgtgcccttttctggggaagcacagagctcctgagcttccagctctgggccccacagcccttggagctggggggtgagggggagacacaggaccttcctcaggaaaagagggcaccccactcgatagtgaagccaccaggcagctatggaaagtgaaagttggtccggattccaatgaaaagattaattggaaaacatttctactccattttctaaaactgagttttcccatagaaaaaaaaataataaagctatccctaaagttctttcagcttctaaaaagaagatgctgtagtaagattccagtccccaccgccccaactcccaggaaagcaattgggaaggtttcttaacataccctgagttcttccttccctccccccaaattccgtgtgtcatggggtggaggcagtggtgtgtttatcagggtggctggcacaattcacagccacaatcatgggggtctagcgagctgtggaaggcagctcagtgggcagcgaggccctggcagagttgcccggctgccccagcccagcgttgccctcctgggcagtctaatccaatgtgaaatgaagtttcctgggaagcagggcacacgaggaacttttgaatttaccaatggcataaaaagtatatatatttttatgacaacgggcaagtttcaattggttggcagaaatggcgagatgtgacgtcaagggacactggttagaatgccaaggccggcggcggggggttggggggagacaggcacagacagacattgggttgggacccgggaggccttgtttctctcgggccctggccgccaaagggccgtcgcaggcgtctggggacatcagctccatgcggctctgggccagggcatgctcgggcagggggacggggtctgcgaatagtgactctgtgtccgcgtgcgtccccgagagccggaggcccaggccggcccctctgcggtttgggaaccactcaggcgcctctgtggagcgggcgggaaaagacgccgcggcctccttggcattctaacccgtgtccggaccctagaggccggccggtctcaaccaccgggagggcctgggagggaaccgtgtggcccggggccagcagtgtcgccatcgggctccgagagagcaaagctgtggccttgaacttctccccgaagctcctgtgccctgagtcggggaagcaggaagttgttgccaccgggaaggaagagagcgcgctcggagctgggcagcggctccaggcaccgcgcccctgcccatcccacgcctccccgggcaccgtgaaccaccccccaacccaactcctccaggcaccttgcgcgcccctcttacatctcccggcactgtgcgctgacccctgcctccgccggccggctcccgtgtgccgagtccggactcccacccctctgggcaccccttgctccgcggggccggcggtgtcctggaagccgccgcggggttgcccgtgcgcgcgctccgccctgggggaagcccgctgccaccgtcggccccgagcgctgtcccggggccgcgtcgagagctccgcagcgcacactgttccccgcggggacgagcctggagagcctgaccgctgtccgcggcgcgctcggggctgcgggcaccaggttgcggggactgcagggaccgtcggtcagccaggggtcccagagccgggcccgagcgtgcgcgcgcgtcccgctgcccgcaatcatggcagccggcgccttggagcgcagccgccgagcgcgccccagcagccgcctcggtgccagggcggcgggggcgggccgggccgggagctcgcgcccgcccgcccgcctcggccgcgcgggccccggggcgcgaaacggaaggccgctgggtctccgcgacgcggtgcccttgcccggggcgggcggcgggaggggccgcggggcgggggcgcgctggaggggagcgcccggggcggcgtgcccgcggggacgcgcacgcggggctgcggggcgaggcgcggggcccgggcggcgaatccgctgctcgcaccgcccgccccgcccgcgcgcgccgtcccggggtggggggcggtggaagggggaacccaggaggggcggcgcccggtcttcacccgcagcgggcacggcgggggccgcggggggcctcgttggtattccgggcgcggttgcatccgcgacctccccgcagaacaggggtgcccgggcgcgcgggcaccgccgccgctctcgggcggtctccgcgggctgcggggcccgcaggcgccttgctttccccgtcccctcctccctgggttccccgtactccctcccccgctccgatccggcggcgaaggggtgggcagggaaacgcgctctctgggacaggtgccaactccgagacaaaagacataaaataggcggcaacgggggaagcgcggccggcgcgctcgggcggggacggcggcgccgcgggggccgcatcctcggtgccgacccgggaaagtttgggaagtcgccgcagcggcttcgcagcggcgggggacgcgcggcccgggtcgccctccgcgccgcgctcgccctctccgcgccgctgctgaataattcatggcgcggccgccggccattagcatgcaccgggcgcgcggcgcgtctgtgccaagccgccgccgcattcggcgcccgggcagcgccagacgagcggccgcgcggcggccgggcccacgctgtccccgcgcccgcccgtccggcggcgcccattgtgccccggcccgccccgccgggctgtccccaagcccgcctgcaacccaccgcccgcccgacggcccggccctgcaagtcctggctcgcgacgcccgccccggaatgcacgtgaacttggagaaagtcgcggggcgcgccggccgggctctccgcggcagggcgtgggcgtcccggggccggcgcgctttcgttttcgtctgggacaaaggtcccttgcggcgcgcggacgccgtgaccgggtcctgcgggccactctgtggcgcagtcgggtcgctaagcgcagggaagccggagcccgaaggcaaggagagacgcggcgcggggccggggaagtggggcctgggccgtgcgcttcgcccgcggcagtccagagccgtcccaccctgcgaagagttgcgggaactggcaccgctctgccgtccgccgcttcgacgcgggaagagggtgagcgtttggaacccaggactcagaccgctagctgagggcctgtgcagctctgggcacgcgagcgcggcgccggcggcggccaggcacggtcctcccgcaagggcagggctgtcgacctgtgcgccccaggtcacgatcgggttcacggcgactcctgaggacggtaagtgcatttctcactttcgctgcttagtgagtatttaaatattaatgaagggatctctaagagggacccttccgtagggcaggccttccacagaccagggaacgcaccgaggaggttgctcttgaacctgaagccgcaccagcttgcaagaactccactcggcattaatctggatcttggaatttgtgaagcacagcttctaatctcaggtgtgcaggctatttgccagagagaatcttgttgaacacataaaataagcgttagcagacatcttaaacacaatgggaagaaaagaaaaaacatctgtttttagatttttttttttttttttttttttggtgagatgtgtttggaaaggttattgggaagctacaactctttcttggaagattgaaatatttcatttacttcctaaacccacgctgctgattttttccccctggtcggacacttggggacagctgatttgaggggggatcctcggttcggcgttggcggcatttgggccggttcagtgaaaggcccttgtgtgaaagctgctgtttacggtggtgtaaaacgaaaaacaattcgtaactttttgtggtaaaatgcccctttataggtgcctcacacaggcccagccagtggtcctggggagtttgtgaggagcaagaaaggggtgaaggaatgcttgcgtgcaatgattatagggtttcaaggtaacgtggagattaatttttttcaaaggtgggtttcaaaagccgaggcagcctgcaggccagcaatagcttcattttattggagttcattggctctagctctttggggttttaaaatacgtgtttgtccgtgtgtgtacggagctagggttaaaatgaaaccccaaactgtgggggattgagcctgctttttagtatgattgtgtcacaggtgcaatgtcccccctgccctccccaccctactgaggtggtttggataatcttgctgggtgctttcaccacaaaataatggggggcctgtttccataacaccccagggccatgagctggctcttggaggctgtgtttctgggaacagggacagaggcctgggtagtccaggcttgcctcatgcctccctcccactgggctgcctagtgccctccccaaaaaccccaaggactgaggggaccatttcagtcgggtccagccagccgcggccggaggtggaaagtttgcctccgtgctggaagaactaaccttggccgtcttttttgctgggctgcctctcccattgccccctcgctccattttgggcttttatttatgactttatcagaggcagttagcagacatgaaacctggggtgggacattcgggggcgatctcagaatcggggcgcagctgcagaaggcatgccgtgatagccgggagcttctacttggcatggcgttggcagtgacgaggttggtaattagaagaagctcaagttccaccggggccttgcctgtaaaatgctggagacgtttacccggaggccacagcagactgggaacatagcacggagggcaggcatggtgtggcactctactgaggctgcggggagtccctctggattaaaacagattccgaaacaagcggtatccagctctcctgctcccacaggccagacctggggctagccagggaaaggcctgaacgtcggaggaggcagtctccagggccgccaagtgagggctgctattcgtcaaagctccagagccctgtctcctgccacacagtgtggccctggcccatgaaatgggatgaggtcaagattctgcagccaacagttggggccagcgctgggcacagaagccctggcgaggccctgtcctgcctttgtccatgttccttagagccagctcagcctgacagagtctcagggtcccaccaggggcttcccagtggtgttggagtctcccatcccggcacagttcatttttgagggcacacacacaaaagagaaggctctgaaaatgaaactgacacttgtctgtttttttaatcacctctggatttaacatcaagaatgtggaaagcagtggcccagggccacaaggactatggtgtgggctggtggaaggatgggccccggtttttctggttttgttttaaaccggggcctaccccaggatagtccgttgcctgtgctggggcctcaccaggccccagaccctcctgggtgagaagggtctccagggtgctgatggggacgagctgggctccacttgggcagtgcccctctgccatgttgaggtctcgtgcacactgcctgagcaggtgcaggccagcagtttgccttgctccgcagcaacagcgtggtgctttgcagcagggttaccttttgttatgtggtttgcacctggctgggtcaggctgtccgtgtgaacctgtctcactccctccgaccccctaaagggcggtggggcctttcctacctagcatggatggcgtgtgactggaaggcagaccgtgtggcccaggaggaactgggaaaagctctgcccacccagatgggcaccctgcctgggcaggtgctgcctcgtgtccaggggaacctctcgtgcagtgtagatgcatgcatgtgctgaagggcggcctctgggaagggaggggtccttccaggccgggcaggaaacaccataaagccaccatgcttccttggggtgttgtcgctgggttttgagggttctttgcatgtttggggagagaggagaatgctcttgccgaaatcgcagcaagctggagtctttgcaccctgagcttcagtctgcccctgcccctccctgggtgaccctggcacatctgagctcctccctcagcctggattctgagctgtaaagcgggaagagtgttaacccacctcagagacttcaaacattatttccataaagcaccattccaggcacgttgtcggggaggggcgggacataaatggctactgctgttgtcacttattgttgtcaacaataatcactgttgttgtttaatttttatttattttacttgccactactattattttatatattgtatgatgttatattctaagtaacagataacccaacttcggtctcatcagaaaatgaaccaagaagtttactctcccggccccacaggtgggagcaaaagtggaccttgatgatacctcccaggtagactggcaggaggttgcagagccagcacttttctcaccacagggacttggtgtgaatgtggcttccagatgcatcttgcacctcacattgggtacacaagatgagaccagggtctccttggggacccgggaagtgctgacggaggaggcactccttcccagggacaggacggaaagcatgcctgggtgctggctctggatctgacctttgcccccccccccacttcaggggcaggaaagaagggggcaggacgtcctgatgcaggggcccagagcagccacaccagccaccagcgtcctcgctggaaatgcagatggtgatttgttgggagggtttcaccactctgacgagctaattgttctttggcctggtacgttaaccaaaatgcttgctttggagaattttccctcctagctggttgttcaggaagacccagcaagatcgtccttgctgaaaacatcttgtcggaataagagagagctctaaatggcatgggtcatgctttctgatgttatagaactgagtagggagaaaaagcaacaattgtctccaagcagagacaatggatctttcatatgaaatatttattttcagggctgcccagtgttccctgggctgggacggtccgtggagctcgagcatccgggaatggcaagccccaaacatgtagttggggacagagatttagagaagaaaaaagaaagtctcctgacccgtggttcttgaacaatttcagtgggcacgtctggctttctttgtcgagtggaggctaagcttgcacgagttaattttgttttcttccgtgatttttttttgaaagccgcagggctgcacttggcgagtgctagaaagacggccacgtttgggatcgtgggccggatggggcctccgtcggccaggcccagttggccttagccggctgggtcacaaaatggaagtgtgaggaaaaatagagcccagaagaggaagggtctgtccccaaagggctaagggagaggccatcgagagggcgatttgggccaatatttgtggtttcccagtgtctgctcctccccaaattccattctcagatgaacttgggagtggcccgtaggttgtgggagagtctggcctgacttggtgaagccacacacaagcaaacacccttccaggctggagagggtgtttttgtaactctgacaaatgtggcccagagttatggctccgtgaatattttctgaatcgacagaatgaagaggcctacacatgagccatcccctggtcccttctctgaggtgctggaggagctgccccggagaagccaggccagagtccaggctcccgttagcagatgtgggaggagcgggccgtgctggggccgtagtgaagcgatctgtggtgctcggggagcgttgggaaggctgaggtggcccatcagctggggacacccggcacattacggggacctgtctggacaccccagcgatgccttgaaggaggacagatgagggagtggccctgatcaggtgggggaccagggtcacccaagcagctttcttggccagttatatctggcttcagaaatgaggttttattttttcgtcaatcggctgtcacgttttatttttctttcaatgccagagcttctcagcttggcccctgtagccctgtacgttagcccactcagaagagagctctctttcagggtgtccaggagcctctgacactataggtagaattggtataatggaaatcatgaaaaagaatgaaattttgtgacaatgggcagaaaaaccccaaaaccaggtttctagtcacttttttgtgcgtggtgggaggcagtttgaaagtaaaacggaaatcagggatgggaagcttcttggtggggtctggactggggagtctcatctttctgaccacccaggaacctgtgtggagagagtggctgggccactgtccagccagcgccgagagggtttccgagtagagatgttaccgcagggtcaccggttagtgttgtaaaataagactggtggttgtggatactaaacgtgtgcatgagatctacacggtaaaaaggccaaacaattttttaagcagtgatagaattttccctccagatttagaaggaatcgtccctgatgcttctggctttctaaaaccagggcggttttcccccccgccccgtggaacgccctttccttcattctggcatttcagatggcaggaagagcatttagctgaaatatttacctgctgatttggggttcttaaatttagaatcccctttcatgtgtttaagagagatatttacattcaaatcagccttttataattacattttaaattataataaaatgatggtgccggcgctccagttttccgtgtcttttaactgtaagagaagctgccgtgaattgaatgggggctacccatcacccagagtccccgctgcccaccgtgtgggttctggcctgcccgggcacacgtgtcctgagcatggcagctacatgggtgttacctgtggggacctccccgcactgccaggagaagggcctgacggggattctggccccacacagtgcgatggttgcccagcctcaccgcctgcagctccatctgagaagggcctgatacgggctggggtccaggcccactgccctcatgtcctgagccccacggtggcctgcaggcctggtttggaggccattatctcctcggcggccagccgggcacagcagtggccacttctggtcgaggcagttctgtgggtgaggggcgagcatcgcctcctgcaaccgtaacccaggccctgcctcccctgccatgcccctgtgggtcccgtcgttgccatctcgtcctcagtggcttcccgatgttgcctgctggcagggcaggccccgtgccatggagcatgagggacccttcccctcccagggccaggcttttggcagccaggccaagccgctgctggaatggaattcccggcgttcctggtggggcgcatggcatcggaatcctacctgctttgtctctggcatcagctggtgagccagtcacgtggccgtgtgcgtgagaccagagcccaggactgagggctcctcccgggcgcttcctcctcgctcactcacccccaccccctttttttggctttcagcaggactggctctgagcaggcgtaaaacagtgttaaaactgaatccgggcagcagggagctcctgtccacggcggcaggctctcacagtccaccgggctctcgcggtccacccagaccaccctttacctcgagtccttatgcacagaaaggccctgatatgtcccatacactcaggagttaggcccagagctgggcagtggtcactccacgccattccctctggtgtagagctggccctgcctgcccccagacggccgtggggtgggtggcaccgcttcctggggaaccccttcccacacttctggccttgtttctcacccacacaaggacaccccagtggtcactgctgcagctcgcggtcacatagagggtgagaggggagagctggacaaacaggtgacccagcagacccagcctgatgcccgcaggagagagcaacggggtctgatattttgtctccaaatgaaagagccacagtgaaaccccaggcctgccaaccccagttgtagggccagagaacagggatgtttccctgaggcggtggcaaggtttggtttggtgaaaacgaaggatatgtgagggtctgagaggggagggtgactggcctagactccacccctggcgccctgtccaccgtggctggctggccactctcggacccctcggcgtcaagcgctgactgggtgcctgcctggggcttggggctctgtacgtgttaattctgccactccagcagccctgagtgggaggagccattatcccccttctttctgtagatggggaaactgaggcaggcttgcccatggtgaagtggccagtcggacacagggccagattgaaacctgcagcctgggctcccggctacaacagcgccagcctccacaggcattagaaggggactcactgcgagggccccagccagggcagctttcagggtggggtctctggcctcaccctggggaaacagccggggcgctggctgcctcctgctgagcctggcgtgggaacaatgtggcctctatccctggagcgagccaggccgcctggacgcccagcccttcagagcagcccggccaggcaggcgcccacagcatggcgcccgggccgcgctgtccgtccacggggtgcgggcgccttggccaggcccaggcaagccgctccccgtgtcctccctggctggccactgagtggccagacgccggcttcctcctccctctcccgcccggccagcctcctccttttttggtggtgggtttgggggcccagcccacccgccactgccacgtctgccatcctcccgcacccacgagcatctttcaaaaattcccggtgggcggggctgagctgcagcggccgcctctgccccccctccccgggcagccagtgccagatgagagcaggagacaaaagtagcattttcctcgtactccggggctggcagcggggccttcccccagcaccacatggctcctggcagccctgccccctgtgccggggtggccgaggcccagccgggcccactggaccgagggacggcggcggccagagactagggggcccgtgggcccatagctggggctggcaccgggcagcctgctggccggcgggacctgccctcctcccccacccgggtgaccggctgggcccagggacgtcattttcacttcctggctttggagaagacgcctccatcctccggcacctcgggtaagtcaccttctttccttctgtcgtgaagacgagccgagggtgctgccatcttgtgccccggtgcctgttacgtgtcctccctctaattggttctccaaactcagaattctatttcagagccctccatcttccgtgcaggaagccctgccaaaaactgcagggaaaatgcagaagccaagcccatttactttcaagatccaaagctacaggctttagaaatcacaataaaaatgaatgtttattatttcacagtagctgcgtcttccattttaatgggaacaaatgctttgggagtattaatagccatggcctactcctgccttcctggttgtggcagtttgtgtgggggtctcattattattattattattattattattattattattattattattgtcttaatttttggcggcgccaggagtggcaaaaggaaaaccaccaggaccatccacggctcctcccagcaaactcatcggcaggcagggccaggctggcacccgggagggaggactttgcatctagaaacagaggcccttttattttgtccggcatctttaatgctaccatgtccacagtttagggatctagttctttctccctttcgttttattttttggaaaaaaaagaaaaagaaaaaggaaaaagaaagaaagctccttttggccctcagctcagtgtggggaaaaatattttcggttgttttgggctttgtttttgagcacttatttcaacttgggggttccgcctgaaagtgctgggcctgtcttgtcaccgccctgaccgcagactgtgtgtggcgtgcgcgtgggcaccgttcactacacagacccttggggaagccctgagtgccctcatggcctgcccgtgtcctggatcccaccccagttcctcacctgcagagctgttgggggagacacccaggtcgtccagggcctgaaacgtggctggcagggccgggagtccctcaaagacctttgagtccccccgccttgccacctctgtccaggagctgggctcagtggctgcccgggtgtccctgttggtccctgcccctccaaaagtgctgatccttttgattcagaggtgggctttgcagagcacagccccatgtccacctccacgctgtggcaggctgacaaaagcgtcctcggatgcggcctggttccccacccttgaggggagccagggtcttgatatatagaaaatggaagaatcagacccggaaagttctaaacggcactgagaggaaaactcccatggaaatccatctttgttttcccagttcggaggcgcgtgggccctgcgtgcgcgggcctcggtctgagcggccggcctcggcagacagcaccaaatctgtaaacggagctaagctcacacgaggactctcggcggctgcttttgttcgtagatgagccagcagtcgatactggagggtctggggctgcagaaacaggcatatatagcagagataattaaaacatttcatgattatgacagccacattctgctgctgcaagctggaggattcatgccacccaaatatttagcaagcatcaaataaaacactggtggcaaaataaaagtaatagaaaaaaaaaacagagcgtaatacatttcaaaggcaaaagagtcaaggggatggatagggaatggatcgggggaaaagtggggagagttcagcattttaaaagaattcacatgtttaatagctggccactcatattttttttttggtataattaatgtaggcaaatagacccttaattctaagtcctggaatgagagatggtaaaatttcctgattattaatttatcatttttgttttttgtacagggtaggggcaagtagcagaaaaatcaattaattcacataaaggaacattttcattctaaattaatattgccactgcaattaaatttatctagtatttttaacatgtatggataacacactttcctgtgtacaccttggatacctgggaccgttatatgtgatcaactatcatcttagttttttagcttggttaacacttgacccctccccccacctcaaaatcagtaaaatgctgtggattctgctttttaaaaaaatcaggccaaaatctcagcattctccatggctcccagtgcttctcggcagtttttttttttttttttttttgaagaaagtaccacgcaaagcacttttcacatcatcgcttctatataaattccactatagactgaaattatacattctcgcagcacagatgggctggtctgtcattacggctgctgggtacttgttggaacacacagcatatttcaattgtggagtcgacaatttcgaagaactggggtcaaaataaacaagttgcatttgtgtatagaaacagacttattcaatgatcttctcatcccctggaaaattcggcagaggaacgatcatcaccttcattaaacttgaatttaatttttggtcttcatcttttaagaccccacatgccctgtgtcaaaggcccatcaatgttttaattaattaccaatttttctcttatgctgcagcattagcagtggaacacaagatttaaattcaaactcgtgggtgtggtttttaatatcttttgactttaattttaacatcttaataattttaatatcttactaatctctataggggaggtgtgaaacctctgttctgtgtcgagttgcctattgttttgaggcctttatgaaaaatcagatgattcatatttaggatggtctaaagatacatttaaatccaaacaccacccacaaaaaaactcagcaggtaaaatacatagagtagccataaacttaaaaaaaaattatctcaccaagataacaaagtgcagaatttattggtttgtatcagcctccttgagggcagagcagtttttacagccacaataatttgcaaatgatgataactgtttattttgcaaatatgctcatattatgaggccatcagtggaggcttttttcttttcccatacgtgtaagtgtttgcctctgtgtttctaaattctggattcaggctctgcagtttctcaccggctgagaccacgttcccacgttcctgcctcagtggcagtggccgggaggagggaagggcgcgccccctgtgttgcctcctgcgagctccagccgccacatccatttgttcgtagaagtgctttgttgtggcttgtttattttaagggatgtacctgttggtggagatgttagcaaatcataagaaaagtaaaaagttgatgaaatttgccagagccgcttgggagccagctctgctgtctggtggttttaacgacatcatcccttccagttctggtcttttagcctattgactcccgcctccttagcaagaggaatatggccctggtctgggcgctctgaaagatgaggcaaagtgaaaaggccccagcctctgggccgcagagcctctaagcagcggtgggcatggcgatggtggtaatagtagcaacagcactctctgctgctgttcacaggtgcccgctgtgtaccggggctcctgctttcagaaaagcaccggctctgggacccaaggtctcggttcagatggggtcgtctttgtttccaggccgtgttgatcaagggcaagtcatttcacctctccggcctcatttccttatctgtaaaatggaggcagtaagtgtcaactttctgaacacatggaaagctgggttcatggtgagcaccccataaatgctattgcttccttgccttatttctaaggctcagactatgcctgcaagggggcattttcattacctccattccaccaggggaagcagcgaacctctgagaggctaagtgggttccccaagattcaaccagctgataagtgttgggccagggcttgaacccagccctgccatccttcaaagcccatgtgctgccatagcattcaccgacgcgtgttgcggcacgcgtgtgcgtggtgccccgggtgtggacagcatgttggtacgcagaggtgcagaggtgtgtgcgtgtaatgtttgcacgtgtgcataggtgtcctcttatttctccattgcgtgaggttcctggtaggtcggcagtttccaaagaggtgagctggtgtttggaggtgcattggtcggagtgggccacacagtcctcagaccacacctggggatgactgtgccatgggctctccaccaccccagggatgcccgtgggaagaagggtggttttccccagtccagggctagccaaagctggcagcgggtggactgggcatccaggcgtgggcttctcgtaggtgctcagcactgctgagggaggctctggctgagtggcctgcatgctgggccttggccagacgcgctgctgcctccttatgtggacaggcggttctgggcgccggccatttgcagactgggaggagtggaagtgaggcctgcgggccccggagaggaaatggcggcgtgggcaggcccagaacaggaccgggaaggcgggccgagggagggagtggcccagaaggcctctgtcggccggtcagcgtgctagcggcctttctccaagaagcggccagctggccaggccttcccgggcaggtctgtttgtctgcccacatgcacacacgtgcacctgcgtgccagggcacggggaggtttagtggccttatttcctaatagggaacatagcagggcctggggtttgatgagacggcgtaacgcccagcacaccttcagacaaaagagaccgtgataaaaacggttcttactacaaggtcccagcttctgtctttaaaatggggcttccagcctccgcctcagtagatggttggaggcactgcatgagatcctggtctggggagcccctggttcgttggtgtttcccttgccttggcctagtaagaggggacgggaggcccaggctctgtggtgggcctgtctcagcccatttcaaaccctacccactgccttcccatgaccttaacaggatggcattacccagcactcacccagatgccagggtggcaccgggtgagtggcagtttcgggtggtcctggagaagggtcctggcatcggctggtatgagtctctgggtttccgagcttcaatgagggctggattcagggtgtgggctgggccagccattccggcaaaaccccagaaggaatccacaggaggtggggaccgggaaggcagccgggttgcgccagtgcctgcaagggaacctctggccccatttcctgggagcctgaccccgccctaggattcctggagtgggtgtgcccacgcttccggcccagacgtgggtggagggatcccaccctgccaggcctcccgcctgtgcggcttctttcaactcgatgagaggaggactcctcctgggcctggtgcttcgaggtccagacgagcagacactggcgcctgtgaccctgcagcggacgcccttcaaagtccgtgtggccgcatttggaagcctgggcggcgtggagacggcgccttcagcttgagatagtaagttgcccaatgcctgcacctgtggagactcccagcacctggtgggtgagccgcagggggctcgggcctccatactgggtctccagcagcaggggtgaggtctctcctgtgatggactcaaatgactcaaacccactgggctctgcccgaggcatctgcgctatggaagcagcttgcaaatgggctctctggggccacgccggcccacggcggccacagcctcggccaggagccgtggagggaaagatgaggccgctgcagcatttccgtctgccagggcgacgggggccagcagggcaggagcagcggggaaccctgggtggtggagatcccctgccttggtccaggggagaaagctgggggccgcatttggcacccccagggcagtgccagtgcatgttggatgttagactcagccccacatggcaaggggtgttgagctttgttgagcacatactaagtgccagaccccaggccaggtgctttccatccattttgataaacatccatttttaaatttaatctgccagttccatttccctgccacatccatttggagccagcacgtagcagtgctgttctcaggccagaatgtggagtaagcaggacagacagcgtccctgtctgggtggaagttccagtctagtgacgtgtgggtgctaacggttttctatatgaggaggccaaggttcagagaggccgagggatctccccagagtcacggggccagcaggtaccagagccttctccctaacccaggtcctccccacgactgtgcctgcacagaaccacacaggatccctgtttatcttcagatcttcagcctctcttggatgctggccttgtctggttctctccagacacccagcactaggaaggaccattccgtcggcttggagttcttttgccccggggagagccggaattgtcctggggtcatgggtcactctggctctgaggccctgagtcctctctggctgagtggccagcattcagcgcatgctggtttgggctgtatggggctccagggcaccctgccactctcgggctctgtgcccaggctggtgtgctggcaggtgtgagactgcacgcagtgtggcagcaggcggtggcaaggagggagctgtggtcatcctcgttcttggtgttcctacggcccagaggtgggaacgtatgagactgtacacccagatgccgtgtgccagaccaggatgggctcacaagacaccagccctgcatgggcagacggggaccacatcaggtcacggggcacaagaaccttctggagaccccaccccatctgtcggcatggttcacgttcatggatgaccaatcatctctgagcgctgtggcgctcatggccctgagtccacgggttttctcgtgtttcagagcagttctgagcccacttcattctgcagagcactggctcagagaggttatggaactcatcatgtgccaggccccaggacggccacgggaagaggcctgagaatgccgtcgagtgacgggatccagcagacctggtggagcaccggggccttggccagaggggctggagccctagacccaaggtctaagccctgcactgcctgcgcctggcccacaggcatggcggcctcactgagaggcaggctgcatgtcctcagcaaacacgggcaccagacggagaccagacagaggccagtaccaggcggggctgagaagttagccggagcatcctaggatgccaggaagccttccagaggtggcagccccgcagcccccgctccttcccacagctgacctccagggctgcagctgcagggcccctgcgtccagccctcggacctgccacgtcccagggccccactgccaggcaccgccccgtgccggccctgtacaggccacatctgctgcagcagccatgccagagctccgcctcccgggctccgtccccatggaaaccacggtggggggggctcctcctgcatttggcccgctgactggtttccattagagccggcctgctttccctgagctctgcccctgcagttcaaggcttcccctgggggtttcttcccacatttaccgagcaccagccgttccgtgccagggaacccagcggtctgggccccgcccgccctggccagcacccaccggtggtgcctgatgcccggcaccgtggctgctcccctgtcctttcttatcgaaggccagctgctgctgggtcctggtgtcgtggactcagccctggatctgagtcagggcactgggctcccatcctggctgggccgtagaatcactggtgggcacttgaataagccccttcctctctccgggtctcagtttacccatctgtaaaatgaaaagctccatctatttcttgagttccttgcaatgccgagaaagaaagacaaagagaaaatgaagccacagtacactgttgctgccgggttctcagaactgggatttttgtttgctttcaaagagggttttttttttctagggaaagagtcatggaatttgaccagagatgattgtttgaggggccaagagccagccagagcccacggacatgcagcatggaaggtgtagccagaagcctgggcagcgatacccgccggtccgccttggcatctgcttggcacccagtgacctggctgtgaacacagtgagcggaggcaggaagtgtgcctgcgccggaatccgaagggctctggaaaactccccaagaggtttccggaggtcagaaatgtgggcagaaaatgagatccagcttttaaaaacctggccgactcatcccccgggagcctagggaggcctgggaaggtgcctccaccaccacgtggctgagttacgagaagagctcgccgggctggacctgggggtgctgggctgttagggtcggcagcaaggtggccccagcccagactacgtcctggtggtgtcttcctcctccagctcttgggagttgggaggcttcagcggggaggtggtgatggtactggggccttttgcctggcctgccagtggccagcatggctctccccgtgggaccttccagctcctgctgcctggggtggtggtgcgcgttggcctcccctgggccctgtgggtgctggtgatggcctgggaacacgtttccagctcacagatgaacagagcccgggaggtggaagaccttcttggcagcagggagtgaatggcccagtggggtgggcagcttgcttagcctcccccagcctcggtatcctcatctgtaaaatgcggctagtaaccttgatctcctggtcagggtgagagttagacgagacgagaggcgggatcaaagctggataaatggcaggagacagcaccggaactgcgcccaccccgcatccttgtcatgatcaaggcagaccacacgtcccagagagcccagctccatgatgggagagcagggccaggctgactgtggtcaggcccacctggaggggctgctggcaggctcttgggtgacagccaccctgccctggtggcccaggtagcctgagagttggcgtttcctcttcctccatctcagtcaagaggccgagtcaattccccactcagcttctgcccctgcctcctgcccgaggcaacctggctttgctgactggtcccagtgataggggacattgtcactgtggctcaaagggcgggcttggtggcattttcagttttctgtcctgggaaggaatgaaaccttggttcgagtggccgcatctgggtggccacggcctttgcaccccctgcctttgcgccccccaccccaccatcccgatgaaagtaggccgagggcgtcggcacagagcggccgccgcggtcctggccagggcttgatttagatattcggggagactgggataaggtaggaaatgaaggaaatttccccagggaaaggggaagagaagacggaggagcttaagtacccacatgattattaagcgtggctggtgatttacggccgggcaggcggctcctggcggctccctgccccctccctcccagtgccctgcaccctggagagccgccatggggaaaacagaggccaccaggtgggcccagcacccgagctccgccttatctcctgggtctaggccctcggcagtccctgggcaggtgacgcagcacgggacacagctcctccatgtgctgggcactgacatctgtcattggggccacctcacagaaccctgacggatcaccggccctgtcttacaggccaggaagcccaggtctggaaggtcgagcctcacgtggccctctaaacggtggagtctgagccagcctggccaccggcccaaaccctaggcctttctctctaccacggccaggttcagtggcctctggtgggaagggctggggaggcccttgtccctccttagaacaagggatgcgggtggaatggtggtggctgtggtcgcgaagcaggcctctgcccatcctgccctgtctcctgcctttcagggtgcctgtacttctcttggctgaattccagtctccccttcaggggactcttgagaccctcaacagccagccctgaccccctccgtggccccatcttcgacctctgtagactatggcctagtgtcacctcctcctggaagccctccttgctctccactcacccattgccctgctgtggggcctggggcctggtagtagcctgtctggggccagggaagtgttcctctgggaaatattttatgagtgaatgaatcagaagagaaagccatgacctgcctgcctgtgctcagtgccacgtcagaagccaccaagctgtggcattgccccggcaagtttatttttccacctccactaagtaagttccacttcaggactcatccgagaggttgtgaagccacacgtcatcaaaaacggcatctttgcactcagcaggcaggctggtgcagcccgtggtgggggaccatcctgcctgctgtggggtaaggacggctgtgtgcgccaggctacagggaagccaaggctactgcttgggggtttcactggggaatattaacaaacagaggtggcccagaagggtcatggagccttttcttctcagactgctgggtatggagggcagggacccattgacccgtcaggtgtcaccggtgggtggtggtgcattctgttaatttaggtcagagaatttaggttcagtttacagatttcctgcacagtccctcctctgcatcgtagctcatgaacatcctcttcctccaggaagccctcacacgctgctgggccctcttcctccaggaagccctcacaggctgctgggccctcttcctccaggaggccctcacacactgttgggccctcttcttccaggaagccctcacacgctactgggccctcttcctccaagaagccctcatatgctgctgggccctcttcctccaggaagccctcatatgctgctgggccctcttcctccaggaagccctcacgctgctgggccttctctccggccacctcatggcagctgggtccttggcccatctggtccctccggaaggaaccgtcgaagctaccatggcctcgtctttccacgttccaccttctcgggtgcaatgaacaagtgtgtagatgccacacatcctcctggggcctggcatctttgtccagagggcccgaggcagctcggggaaggcctttcaagtgcgtcttgggaagctcacggctgaccagtgagcagggcctgggtcccactcggccgtgtgatcttgggccagcccctccccggctctgagcctcagcttcccacagtctctctgacccccacttctgacatgtagtggatctctagagggttctgagggttcaggtgtggaattggctgcctcaggcataaaaacattcctgggcttcaacctgggatcccacctggaggacagaggagagatttattgcagagatgttcatgcagtgcctctttaaatgtggaaagctcgacgcaccagccgtgctcctggggttgggcgtttgaattgaggagttgtgataacatgacctgccggactctcgtgtggccgttcacaatgggagaagcctctgtgggcaggtggaggcggcccacgtccacacgcacacgggagcccctgcgagccaggcctggcacagggttgtcagtatttgctgccacgttctctctctctcaattttccagaactttgttgaatgagcacccattccttgtgcaatgggcagaaaatgtttaagttacaaaacttatcatctggccagagtgaccctagcctggctaaattatcgcaacatgttctcccccaaaagagagacatttgcaaaatgctcaggaggtcatggggcggccatctgccaggcacattttatttcctccatttaaaaggagcagagccgattgaaggggaaggaaggggtgttctggagattggggtgcacaggggtgctacaaggccagcttcccccacatctggcgtggctgatgagagcaactttgctgctgcttttggggcagaatccatccttgtatagcctcgggcacatggttagaatgctgggagtatgatgcctggaaacaatactataaagaaagcaggactcagttctctcatctagaaccggtggcccgtcgttttgccgttacagataccagcagtgtttgtgacaaaccctaatggaacagaagctcccggtgggtgtgtgaatggccacgtgtctggccgtggcttgcttttccagaaccaacttggtggttagcagtcgttgccagctgcctcgtgtgagcacctactgtgtgccgggcaagccgctgggaatttcacgtctgttcattttctcttcactgtggcgtcagatcacggagtaggtgtaaatagttgcctttaggatgtgaagctggggctcggagaggagaggccagcttcttgaagactgaagagcctagaagattctgtgcaacctgtgtgtggctcaagagcctgtgcttctcccaggggtgacagctcccccactagatgccgtgtccttggagacttgaactccccctgtgctctgaacacaccagctgccgtggtagccatcagacgtccctactggagccattttggcccaagagaagtggctgagatggggatatggccctggtttgtgcaaactcagggaaactcggggatgtgacctcctgcagctttgccgtgtgttttgacctctcccaactgcttgggtttctttttttttggagacagagtctcaccctgtcgcccaggctggaatgtggtggcgtgatcttggctcactgatactgccgcctcccgggttcaagcaattctcctgccttggcgtcctgagtagttgggattacagacgtgcgccaccactcctggctaatttttatatttttagtagagatggggtttcactgtgttggccacgctggtctcggaactcccgacctcaggtgatacgcccgccgtggcctcccaaagtgctgggattacaggcatgaaccactttacccggcctgcttggggttcctttgaggccttggacatccgacagcattactgagggccggatttcaatcctttccacagcatcttcacacgtaaattgaggggcccttggtataactgacctgtgcatggaggatgtttctcctacatgtgaccttggagagggaccagttcactgctgaagataagacgagtctgaatccctggctagtcctggtcccgggcctaggccctgcagcttggccaacatcggggttcctgcagggcactcagagcctcctgggctgcccccaaaagtgtctgctcaggtcctgctggccacatttattgccacatctcccagccagcccctgcagcctcctcccaggcccctcctgccacaggcccaggctagagctggcggtcagttgtatgaaaagaggtgggggaggaatttctccaggcactggagcttggagtgacttctcccatgtactcgaagccccctgggggattagcagtgggtgctgctgtccactgagtcccaccatgcccaggcaaggaacatcgtctctgacctatgtgcaaatccaagaagttgggtgtcattgtccccatcttacagacagagagactgggtcccagagaggcaaaggagcttgtgcagcatgaccaggggcagagctgagatgggaacagaccctgtggatggacctaggggtgcttgtgggcaggggcagggaaggggctaggatggggctggggatcggcctctggggcattgttcccagccccgtgttcactctaatgggtttagcaccagcctcgatgggccacgatctgtgaaaatggcctaagctggccctgtcctgggggccacacaggggtcctgcaaggaagcacacctcggggtgtgggctcagagcagggacagccttgggaggctcaggcagccccagggaggagagcattttccgattttttaaaatctccgtaggcaggtaatgcagcatttgtccaactcaagaacacagtcaccaaaaccaggcagagaggaggggaggtcactgggtgagtggtggcaggcaggctgcgggagctggtgctgcttgatggggctcctgtgtctccaagccggggagctgaagctcccagggctacacctgccccaaagctggtgcccactcacttgtgagggcagaaatcccacatctctggtacatccagggcagacgggaggtggcctgtggggctgggccctcggcagctgccctggcgcaggggggttcgggccccactaaaggctgctcagtctctctccacttgccactgggggaacaggcttgtcccgtctcccctcccctcccctggctcctgtaacctggaagtcagacttttgatgctaacctgggttcgagatacattaaattgggctagctacaaaaaagtgggcctccgtggctgggcctgccctggtggcagccctgtgaacctgagcgggggcatgccatgccagtccccatgctgtctggggagctccagtctgtggtacttttcctggggggccccagaactcctgtcttgtctgctccaggtgagggcattggggtggtcccagccagcccagggcggcaggtgagggcattggggtggtcccagccagcccagggcggcaggtgagggcattggggtggtcccagccagcccagggcggcaggtgagggcattggggtggtcccaagcccagggcagcaggtgagggcattggggtggtcccagccagcccagggcggcaggtgagggcattggggtggtcccagccagcccggggcggcaggtgagggcattggggtggtcccagccagcccagggcggcaggtgagggcattggggtggtcccagccagcccagggcggcaggtgagggcattggggtggtcccagcccagggcggcaggtgagggcattggggtggtcccaggcagcccggggcagcaggtgagggcattggggtggtcccagccagcccagggcggcaggtgagggcattggggtggtcccagccagcccagggcggcaggtgagggcattggggtggtcccagcccagggcggcaggtgagggcattggggtggtcccagccagcccagggcggcaggtgagggcattggggtggtcccagccagcccagggcggcaggtgagggcattggggtggtcccagccagcccagggcggcaggtgagggcattagggtggtcccagccagcccagggtggcaggtgagggcattggggtggtcccagcccagggcggcaggtgagggcattggggtggtcccagcccagtgtggcaggtgagggtgggccacatgggatttcctaaccagcctgcagggggatatctccgtgggtggcaggcagggggacccagggttattagagtggctatcaggactcgctgggccccagggtgggggcttttattttggcccaggctgctggtgggagaggtggagagggcgccccagccaccctgatgacgggctctgtggcctcagtgcagcctcctaagggtcaggacagcatgcagcacagcgcttcctgcaggctctgtccaagaggcaggagcagcgggcctgcgccgacctccccttgctatctatcacctgcagcttctgtgggaccccagacccctcccagccctcagtgggcgtggagattgtcaccatggacctgttcccattttcagagatgggctgattatggcacagcctctgtgggatgggaagagggtcggggtgggggtgctggctgtaggctttgcccagtgtgtggccaagcacatctgtgggatgccaccagcaggtcccccagcctcggaagcctcatgaaaccaacttgaggccaggagtgttgctgagaaggagcccccctagctagttagcagtgaccgggttgactcctggccctacccccgtccctgacccagcaccactcacactctcagctatcaaagaggagagtggccccggtcctcaggcgacagggttttgggatggccacactaggccacccagccggccaagcattcttgcaacctggggtccataggagctgggaagcctgggcctggggagggttccagggggtgtgggagagaaaacagtctccgggggcctcagtgcccgaggtgtgcagccgtgcaaggctgtgcagcgccctcccgcttcaggacctggaccctaccttcctcctacccccactcagggctcagcatcccacctgagtctggcctaaggcccagcagaaccccagctgtggcatcagacttgggctgggtttgccctcgaatcctcaccaatagcgagcggtgcccgcctgccagcctgacttgaggcaggatggggaggggaaggagcgggcctctgggtcaccctgggcgaatgccggctcctgggccttgatgttctcctgcagtcagtcttggggtgtctctctctgtggctcacagtgaccacttgagtcacctcttcggaaagaaccaaagtcccatttgtaccttgtaagtcccagatattggatgtcattccaggagtgatgggggatgagtggggcacttcccagcatcctgggtgccaggcactatgtgctgggcccagggacaaagccacataagacatgatccatgccatggagctaccaggcctggggagagatgggcattgcaagtatctgtgagctgatttcaagagacccccagtttactgctagagctagggagatccctgattgaggagggctccctggaggaggtggcctaaataatgggtaggaatggggcctttgatggtgggagaacactccagccctcgggaacagtgggtgccaaggcagggctgagcgagggtggcagggacttctttgagcactgaggtggagagacggtgctctgctgtgagccagcaccccaagccccactggcccttcctctgtggacactagaggacatccacgtccacagctcgcgtgcaggagccagcgggtggggtttgattttgggcgtgcgtgtcaggcaggagcggaggcaaaggcagaggccgtcctcacagccctttgtctcccaggaaagttcttaacctcaggcctcgccgggttgggcccacctgcaggaagttgtgaggggtccctgaggggtggagggagaggccaccttcactccctccccagtcttcagccaccagacctcctgagctgacttcctggtctccttgtgtcttgcagaatgtggccccgtcccagagcaccacccgagacatcaggagcccatcgtgggctagggaagatcctccgggacctaacggcccaggtagctgcgtctttactccccgcctgggcagggaaggactcactccagtcacaagcagcctggagatggatggtttggcagagaaggggaaaccccagcaccaacccagccccaggccccaccttgcagccaggtctgccctgcccagagtcctcgaggggctcagcctgaccctgacaggtagaagagaccccactccaggcccagaagtgagggagtagagcaaagggtccctggcctactgtgtgaccactacctgccgccctgcccagtgggacagggatgccccgcacccagcctcctcaccatccaggtggcctgggggcacccaaggcttcgggcagcccctgagctgggcccaggtctcatggcggtctcagggcaggcagggtgagagctgacagggaacagatgagggaagagcaccccacacacccgggggttccaccataagacttcctcagcgtttctctttccttccaggtcttccacccttggccacctccccaggtgatgcctgaagctcaagggactgtgtccaccctcaggtcagtacagtttgtgaatgttgatgaaaattggggctccccacatccctcccttctggctccaccctctgccgggcgtgcctgaaactggacacacacacacacacagcacacacgtgtatatgcaccagccccagagctctgggggccaaggagccaggcaggtgcttgctgcccattggcacgggctcagctggatctagcccggcctcctgctccttgcccctaccagcctctttctgcggccaccagcctctttctttctgcaactgagggaccagggctccaagcagctgggtttggtccaggtctggccctgttttttgggctcccttctgcctgagttgggtgacactcctgtttgcaaggatccagctgtctcaagggccctgggaggggaggccaggggcagcctaggggaccagtgactacagggcaatttgcagtacctgctgggggctcagcaggtaagatgtcccctgcctgctgctgtctgtcatggctgtctggtggccatggccgggggcgggcttgtcatgctgggaactgctcagaggctgcggccagcctgaggcccctcgccctggcgagccagcccccgagtgcagactgtcgccgatgattcttgcctcctggggcatccgtgcggccatgtgggttgggcaggactggcattctcccctccccaccgttgccatggccaggggcgggcccacctcccgaggctgtgcggagaggaccccaggctgctgcatgtgagcagagcagccggtgtctggcccggacccctctgccatctggggcccggcgtgtttacaggtcggccttgcccgccagactctgcagacgctgccccggggcctttgtgtctgcacgcagggctgagccaccagccgagcggagagtggggagggacacaggtggggagtagggggaggcccctgggggaatcagggaggaggggcaggacagaagagaaaggggatgaagggtaacagaggaaggagaacagcgtggggacaggagaggggcagggactggggaagaggagacacaaggcaggacagggcagggcagcccttggaactgtggggctgtcacagggataccagcctgggggagcagctaaccccaggcatctgacagggacctagtgggtcttggccaaggcgatctggtcaacggaactggggttttcctggcacccaccataagcccaggcctgcccgtgggacctcatcccacctgtacccagccctccctgtatacacagctggccaccacctaatgtaatccctctgacatcccacaggcagcagtgttggtctctagggtccaaatgaaacagaccccacaggcgtgtccctcacacaggactgagcatggaatgtgcccctccctgagtctctgactcccaagcctggactgacatgtccagggaggctgcaagggtgtgtcccctggatcatgggcagggggcaccgtgtgcagctgctgaggctcaggatgtgtgggaaagggcctggagtggaggagaagaggcctgcaggggagtggacagtccagggctgggaccagcaccccaatatgcatgatccgtggaagatgaggctggtcgcacacagaaggtgcttactcagtgctcgtcagatgccagatgctggcgtaatcaccacaggggtcacacaccctccgttaggaccaccagcaaggcagggccaccgtcccacactgttcttgcagagacggagactggggatcaggagcctggccctactctggcctgcagccttgggggctgctggggctgtggagggcctctggggtgctggcttggactgggggagccattgaaggtccatggggaccgggactccttcagcagcgtttgttttttagctgactcaaaactgctccccttggaggccttggcccaggatggggaagcctcagccgggcaggtccctcggccttgcccacctctcatgggcctcacgctcaggaggtggcatcctgctggccacaccatggcattagccccgtgcctcacccacacttggtggcaataacaggagccacagccccaaccagagccggcggccgcgtggcccccttgatacccggcactggctggttttctgaagggactcgttcctgttctgggtaccctgggttctggctgatggagaggccgccctgtccttcaggagtgggtgcagatgtgggtgcatgggaaacccagacgtgagacgggtgatggcttggcaccccatggcagaaccatgctgagaagccacatcggccagctccaagactgcctaatggacctggcatccacagcctgagaatgggccccgggggaccacagtgtgacctcagcagcctctgcagatggtggagtggcactttttcttctcccgagaggttgaagggcatcagcagcggccccaggtggcctccacatgcaggtcgaggggacagaggtttgttctcatgtcaaatacccagacgcctttttaaattttttttaatgtttttattttctatttttttggagacgggagtctcactctgtctcccaggctggagtgcagtggtgcgatctcggctcactgcaacctctgcctcccgggttcaagtgattctcctgcctcagcctccagagtagctgagattacaggtgcctgcctcacaccaggctaatttttgtatttctagtagagacggagtttcaccatgttggccaggctggtcttgagctcctgacctcagctggtctgcccgccttggcctaaagtgctgggattacaggtgtgagccactgcgcccagcctgatgcctttttatacccagacagaagcaagcaagcccttacaatggccctgcatttgatctttcagtcctgctgaaaatgcagatgcttcctgacttgcagtggggtttgtcctgagaaacccactgtaaattgaaaatattgtaagtcaaaaaagcatttaatacacctaactaccaaacatcatatctcagctcagcctccctgaaacgtgctcagaacacttatgttagcctctagttgggcaaaatcatctaacacaaagcctattcatgataaagtgttgaagatctcctgttatttattcaacactgtactgaagtgtggttggtttctactgaattcatatccctttgggttgagaaatcttaagttggatcctggtaagtcggggctgtctttatggacaaaatgcagagtgatggccctcacgcggcacctccctgttggctttgagcagcactctctgtctgggagaaactttagtgagcatgaagttgagccctcaccgtgatgagggatgggacagggtgcaaggacagccacctgctgttgcaggtttcacctgggtgaaacaccttcttgattcggttcagatttgttaggagttcctgtgggccaagccctgagccagtcacatggagtcatccctcttcctgatggccctgctgagtgcccctcccctgaggctcccagagcccacggggcttgccctggccaccaggctggcatacagcagagcagggccctggccccaagctgccccgcagtagaaacacctctgggttccatgaacgttgtctcgccaaggtgtggggccaccagatccctcaggggcggggaaggtctggggtctgggccgagccttccgaagtctggctgtgcagtgggttcaggccctgccactcagacccttgccgggatggtgccggggtgggccaggcccccagccccagtgctcctggcagtggccaaggctgctgcctcctcagctctggcttccctccctggcctggttggttgggcacctggcctcaggcatggcccaggctgggggccttgctccccacacagtagtgagctgaaagcactgccatgtccagctctgggaaggagcaggctcccagttcatcccgcagcctcgtgtcgctgctccagctgtcccgggtacgacgtgcccttctccaaaaacacctcacccacccagctgggctggcctcgagaactggggagtcagaggcccttggctgtccctgaaaaaggaaaacgggcctcctgatgggggcttcctgggctcacccaacacagaaggacctcctagtgcccgtgcgccggcaggtaaacctctttgggtccccgttccctcatccctgaaacatggggagcacagttgctcctgcgctggctgtggctgtgggggaaggaagagccgctccattcctgcgtttgatcaggttgtcacgaggactgagtgagtcaccaggtgtgaggggctttggtgggtgtgtcacagtggcaaagcattcacaccggccaggtccccagctgggagcatgtgcccaggagcctgcggtgtgcagctggtctagccccaccgtggagcagccacgtgggagaggccccgggaacaggcgaggtggctgtgccgttcacacccagagagtcgtcagggcaactggtgacacggtgatggggacagtggcacctgcccttgatgctgccctgtgtcacccaggcagcccccaccccatgaacactgtgcaggcttttccctaatttcattcttgttttttgatgaaggccctgcccgtggctctggatcggcggtccccatcagaggcctgggctgagtcctcaggtgtgtgagtaccatcttcccctgacccggcggccccacaaacacccctctgccagccacagctcggccgccctgggccttggcctcccagtctgtgcagtggggttggtgacgatcacaggcttctgctctgtgcaggtcgggagggagtgccatgtggctgcacccccagcccaagagcagcctcgctgctggacctttgggttcccaataagatctggtgaagacacatggagaccactgctgggcgggggcaggaaggcgtccctgtggcaccctggggccgcccatctgttggatctggaggtgctgcctgccaggctctactctgcatccagcgagtgtttgttgggggcaatggggcccgtgccttttgtccagaggaggccggagaaggggacacaagaggggagtggacagacggtcaccaggcagataagcaggacggggctcggggcttgtttgggaagtggctggtgctgagcttggctggggcagggctccaggaggggccgagtgggccccacccccgacccttgtcggcagggccccgaaagttccacgctgttgggggggtgccgtggaaggtggagcggggagcagcctccgatccctggagcaggttccccagcgttcccgtggcagccacttcatggcacagtggtccccggagttcaggccaggccctcgagccgcctgtctggggaccactccaacctcaggcaaatgaggggcggccctccccgggtctgggggcaaaagaaggttttgaatccggaagcccaggctcagtaggcccttgccacctcccccagaggtcatgcctcaggctaggccacctgggctgcaacatgggagggcatcagtgccccaggcagcccccagtcccccggggccactgcaagacccttagacgggacgacaaggcctctagaagccccggctgctgggagcctaggcagaagaagggcccacctgcctgtctctggggccgtgcgcggggcgggcactgtgctgcttttccggtggctcctgctcctcccggccccatcaccactcccacccgcggcggcctttgtcttccaagcgctctgcaaaatggccgcccggcctgccgccattttgtggctgaggtggccgtggccttggagaggcctgggagggagggcggccatggcctgcctgcctgcccttggcggcctggacagagcccagcgccggcccccgcccagtctggccttggccgtggctgccccaggcttggcaccagccagcctttggcaaggcagcccgggagtcctggcccctcacccagccctgccggcccctcgccaccctgaggcagccctgctgagcagacggagaagccttgagccagggccgggccagtacagcctcgctggcgggggagccctgggccgagggcagctcaggcgggtgtggggcccacctgggctcccggcacctctgcaggggtgacgccttcaggccttgacggctgcacctatcgcgctcctggcctggcccggccgggagtgggtctctcagtggccggcccaacttctggcttagagaggggcaccgccatcctcaggaagagggcagggccgcactctggccaggatttccctgtgttggggccagccaaagtctctgacacacaggagtggaggacctgttccctcctgggcccctccacagcccccactctcctgcaggccccatccccgcaacctcagccattccagacagcatctccctccccaccagagcccctcggcctctcctgagcctctgagcttgcttcctgccccgtcacaggcccatgcacctgcccttccagtagccagaggatcccaagtggcacatttccgaagggacggtctccaggaacccccaggggccagggtggctgcagagcagcatcagggagatgctgggtgttggccgtggaggacaattgtgcccctggccaggcggggagggggcaggtggaccctgtgggagccctgtgggagccctgtggggttggccacacatcggttcctgctatccttgcaacaagatcccctggagggcagtgtgcctcctagaagaaggcaggagaaatcaccacgtgaagcagagaatggcgtttgatgagtgtgtgctttttctaggggtcgacgcaggtcctctgggcagcatggggtggtgccgggtggaccccacggtggcctgtgttcgccacgtggccgtgggtcagttcctcgctggaggagacccttccccagacacctgccgggcacccagccaaacccttgaggcctgggaaggtctctggatgccaccctacaccccgcccagactcctctccctgtggttcctggacagaacattccgtcaccacgaaacgaagtttgcccaggccctgccttcaccctgggaaaacccagccgggcatgggaaggaggaatgctgcccgcctgcccgcccagaccagagtcgccccacatgccaggccaggcccgcatcctcctggggcacacgggagccccaggcttcccggcaggaaaagccccccaccgcagaagggctggtctctggtggggagttgctgctgggtggggtgaccacagggcggggttcaggctggggtatttttaatgatgtagttgcatctggtcaccgccccctgccacccccgattctttcctgccctccccaccttgtgacccagactgtggcttgaattaagaatgttttcagataagtacacgcctttgaggttaaaagtatgcctaatgattaaacaccagacagagatccccacaggagaagagcgggctccgcattcctgcttttcccctttggactccaagcaagcctgtttgcgtaacccgggagcattaaagagcagcttccccggattctccccacagccctgggggctggcgtcctgacccatcatacggaggaggcagctgaggcccagaggggttaacctaccccatcccaggcccatcactgagggagacagagcaggtcagaaccaagcctggcagcccccagggctgtgccccatggacgcaggtgtgtctgcagagcagggtcctcccctgccagtgccagccctcaggtgtctcgggtgctgcgttactcttgtgagcttccacgctgacacctgtggccacaatgttggtgtctgctggacctctggccctgttctaggtgcaggacatgtggccacagcaggcctggcccctgccccagggagtggacattccctgagcctgccccccacccccactgagaacttagtggctatgagagaacaggaaagcaggaagctagacagggcacagacccccgacggtggagaccctgacccggagcacgtgggtgtcagttttggggaagccagacagggagggtgctaacaggagggccagtgaggggaccttgggaccccagacagccctggaaggaaggcagccctggaaggaaggcagccctggggtccgggccacgctccatcctgggggcacccccttcccacctgcgtgcagtgtgcagggccgggggaggagcctggatctgaggagtgcagttccagttgtggctttgccgcggcgtccccatggcatgctgttggggaccgtgagactgtgggcggcctagctgtattgcagcctgaggccagaggagaggtcagtaacccttacccgtcccatcttgatttaagtttgatatttttagatcatggacgtttctgcattgattttcttttttaattttgcaatcagatatttctgctgatggctgggtttttggtccttttaacatgcttcccacacctcgccctggtccctgccctgctgcggccgagccagagccgcaggctgccccgtgtgtgtctcgttagctttctgggccgtgtttgcaggaggcccgcctcccgtcctagcccccggacgccacccctccctgtctttttcccagatccattgttggcacggcttgctgagcagagacactggccgctttatggggagaaacccaatcagggtggcgggggtgtgctccttgggggggtccggctcccagtggccctgagccaagcccgaggtgacttcggggtgacaccgtctgtctgcctcacttgctccagacatccgcccggccctgaaatggccacctgcccaccgaggcctccgcacacctgtcctggctggcccggcccctcccccgcctgggcctgccgggcaccctgcccacgggcagacaccgtggggccggggcagcgcccgggaggtggcagctggcagatggcagagcgcctgccgactgctcactccccgtcagctctgctcaaggagcaccgtttacgctgcatggccctcccagccctcatccaggctggctgcgaagggtttctctggtctgtctcaggaagcctcctgagaaaggggagattcctgctgtctccccaggcctgagccccatgctcacccccagggctgccaggtaggtgggcctggagatcacccccgcacacaccccacaacacgtgcaactggccttctccccaccagctcagaaatggctccatgagtgggtcacgaagctgaaacatcagtctttccccaccccacaccccagaaagccctggttgtcggctggagttctcctgattgcgtgcagatcctcctgcggtgggggtggagcccgctgaggtcacagcatctgtgtcctggtcctgtggagcacagcagggttgggtgtgcaggaaatgtgtccatacaccctcctcagagtcccccggagcgggcactgccacattcaggctccctgaccactgcaggcctgggtggtccagatgcgagtcctagagccttgcgggcagagctgggactcaccagggaacacagggccctcaggggaaaggagcaggaaaaagcagggtggttgtgcctggcagagggacaggccagggcaatgctgggagcagaggcctgcccgggacacttgctgctctgggaggctggagggggagcccgggctgcgggcatgctggggaggggcagagacagtagagagggtgtcaacagtggtagacggcctagctggctgggagcgtgggcagggctggtgctcagggaggaggagggaagggcaccccccacccagtgtccccacaggcccctcaatagcctggtgggtgactctcccggtccccagcagggctgctcttgctcgaggtcacacggtacagggctgcagggaaccacggtatgtctgctcccatccagcgtcttgggctcagccccggggacccacatcccttcctgcctggatgcacctccctggcctttgcaccccgtgcgcaccctgcaagggcactcctgccagaatgggctggcgtgaggtgaagttttcattcactggacaagaccttgccgaagccctgcagccccagactggatgctgtgggcccctcccgggggtttccgctcgtgggagaaccccaagccttcctcgtcctgggtcccaggggaagccacagcccccctggaccctcagcatcctcctcggtgcaatgggggcttaacccctccctccatagtccagccacctgctgacaggccaggcacccgggaaagcagcaccaggctgtcccccctgtgcatcctgctgccctcctctgggccctagagcatccaggcaccagcctggcagggcacaggcttcccagcagggggacatgaccactgaccactcaaggacaggcttgggtcttggtcccctctgacctggcattgtccaacacagggctggccacggaggccattccacattccatccaggcccttacaggggtgggtgagccactaggcgagagacgggccaggctggagtgtcggttctggtgcgggacggctgggcaaggcccaaggtcacaaaggggttcagagctgggtaaggccacgtctcttccagagctgacacttgtcacttttgtttttaaaacccaacaggtcaagaagtggcgctgacctggagcccctgcctggggctggccttcctcacagtgagctgggcctcctgccatcctggctctggaggtaggaggagccgtgggaggtctgatagggagggagggctatctcagagccaggccactcccggtcctctccaggccccaccctcaggcacagaggtccttaggtggggacttgatggtctcacagccaaaccttcgcccaggctgtggcctcccctgaagccatgtctcttcttgtcttcccgccactcttccagcaagctccccccgttggcccacctcatctgcccactgtgcacttggggcatggtgatctttgaccctggtggtgcacccctcaggctggacagggcctgaaggagccgtggttcattgcagggcgtctgagtggaagaggctcagcctcacctccacaccctgaagactcactctctggccctgggctctgttgtgtgcaccgcctgtctgcagggcccagcctgcctcgagcactccctggggacagaagctcctgcgctggcctctcctgtcacctagccaccgggcatcctggagtgcagccctcatgccccgaggccacctgccatcgcccaggatgactcaagatgccacctgggtaagtctagcccagaacgagaaaggccgaatgagggaaactgagtcacatctgcttctcccaggtggggctgggggcccagggggagggcacttgtggtgacgaccagggtggactaggggcctgtctcccattctgtctctgccacacgttatagagcccgacctgtgggctgggtccccccatggtgagcactgtaggctctaggaggctgaagtcctggcctgggggacctgtgggggccaggctggggccattggaatcagtatggtggtccccacctgcactccagctccgatggctgatgacgggggccctggcagctgaccccttgcctcagtggggagaccacggctcacgagggcatgagacctgcccagagcatagcccagaggccggcctggattctcacagctccgcccactgggctgtcctgccccaccccctttttagcctgctgggaccatgagtcagaacccagtaggtgtgaggggacccagccagcccaggtggccagtccagcctgagggggtgggggtctcagagattaagtcaggagcccagagtgcgtgcttagggtgcaacccaccccacagcctcccccaaggcacctcccgggggtgcagatgggggcagacgcagggacactcagggtggaccacctgactgggagctgatcatgaggtgtgcgacagcctgagtcagcctcagctcagaggagctgggatggccttgatcttccccctccggccactcaccacagctgggagggtccaaggagaccctcagccactgtcccttcagccctcaccccaccctggctggctctgcccggacagtccttagggacatcttggtcctgcccaccagccaggggacccagaattggagcaggggagcaggacccccagaccctctcataccgcttttgttctgaggccttgagggaacacggggtcttcgcgaccccaggcgagatgatgctgggacagaggagggtcgggctgcatcggggccctcctggtccccactcctgggtgagtcagcatctcagtctccagttctgggtgggcggcaccaggtgtgagcctcagcggtctccttgctggctaaggacctgggatttgctccagtgcccctcgggagggagtaggacacgtgcccagagagcaagcagaccccctccccgaccaacttctgagagcaaagacacctagagctagagattcagcaccccctgagcctcagtttctccactatgaagtgggatccgtgatctcagccttaccagggctgtgaggattaaatggtccagcccagcctggggcctgcctggagtaggcagcctgctcaggatgggctgtggaaggagggctggggtagacctttcaagtccacttgggcatggggagctgagagctagcatgccgtttaacttggcaggaagcaggccgggcgcagtggctcatgcctgtaatcccagcactttgggaggctgaggcgggcggatcacgaggtcaggagatcaacaccatcctggctaacacggtgaaaccccctgtctactaaaaatacaaaaaatcagccgggcgtagtggcgggcgcctgtagtcccagctactcgggaggctgaggcaggagaatggcgtgaacccaggaggcggagcttgcagtgagccgagatcgcgccactgcactccagcctgggggacagagtgagactccatctcaaaaaaaaaaaaaaaaaaaaaaaaaaaagcttggcagggagcaggacatttggacctcactctgctgcccccttggctgtgtgacatccaggtcacgttgcctctctgggcctcggtctcctcacctgtttaagaggggttgacagtcgtatctgccccctcagcttttccccaggaaggtggtagccacaattagcatttgttgaggctgaccctgcaccaggcccaggataggcggggcttagggaggcccgtctctcgccacgttcccctgctaggggagccccgaggccctctcagtgtcatcctcatgctacactctgtcccagccctgtgcgtcccaagctagggcactgagtgtgccagcacccgcagggacaggcactggaccctgggtggacctgagggtctgtgactacccccccagctgctctcccctagaggccacttccctcaaggaaggaaagaaccttcccgccacctcctgcagtgcggtcagctcaggccagcctgcacagcagggccagaaccagggcccctggggagggatgcctgcctgcccagtgggaggagacggcacgcccgtgaagccgctactcagccagcctgggggccacgagtgctgcttctggtggcgctgtgcggggagggagggggccgagcagggtgggcactcgcatgcctgtgtcttgctggccttcgacagatgacagccctcctcctagggtctccagtgcagagttccttggggacattatggccactcctgtccagatgagagggagccggctgcctgtgacagcgtcgcaaaatgccgccagggctttccctccctcctcctttctctcttcctcgtccctctctggttggtggtttcctgcaggctcccgtccctgctggtgctggccacaatgtccccactcccagggtttcggcgtcccagccccctgcgcccaccgcgcctgcccgccagaatccctgtgcccttggtgcgtgtggcctgccgagcctcgagcccctgttctcctcagccctctttcctcccgcgtccccaggaggtgcctctggaagccacggagtcccatcggcaccaagaccgactgccctttggggtgaggtagtaggttgtatagtttggggctctgccctgctatgggataactatacaatctactgtctttcctgaagtggctgtaatatctgcggtggacagagcgtctggaaccctggctgggagcgggcagggccaggtttgggggcagccttggcagcagtcgggggcaggggccgcctacactgagaagtctgacaggcctaggtgccacttgctgtgtgaccttggacaggcccctgatctctctgggtctcagtttcctcctctgtaaaatggaggcaaatgaggatggaaggagatgcagtgtggagcatcgagggcagaggagagctgagccgaccccaccctctgccccagccgcactgagagaggcgatccacgcagctgtttgtctgacctctgtctcccaacactccccaacactccccccgccatcaggcccaggctcatgggtggccctgagccgtaccctccactgagcaccaggagaaggcaccgtggggccaggggtggccgagacgtttggaggtcacagggctgcgagtattggcgttgcccatcaccccaggttcccagcacgtgccccagcctggccagctcagtggcagggcctctgcctgtggaggaagggaggccaaggcacctttcctgagcaggaagtgagaggaacagctctgcatacactgggtcccacatggcacaatctgaaggcagacagtggctcctctgtacctggggaaactgaggcccagagagccagggacttcccaagaccagccagcagcagctgccccttcctggggtgccatctcccctgtccctcctgccctgcgcctgcccagccctcctgctctggtgactgaggaccgccaggcaggggctggtgctgggcggggggcggcgggccctcccgcagtgcaaggccgggcctggcggggtgaggtagtaggttgtgtggtttcagggcagtgatgttgcccctcggaagataactatacaacctactgccttccctgaggagcccagtgacacgaccccatgggagggccgccccctacctcagtgacacgaccccacgggagggctgccccccacctcagtgacctgcagggggcctgagccgaagctgggtgggcatctgggagctagattcaataaagctgttctgaccatgaacttggaactggcccctttcattctggaagcccagggactgggctctggggcgcgtctgctgcgggacagtgtggaggcccctggccacgagctgttccaggtcatgagacttgtctgctcacgcctcccggtgcctccagagtcctcagttggctccgtgctgtaccctgggctcaggatcccaggcccagcccgttctctgccctctcgtgctgcctttgagccaggcgggctgaacaccgggacccaggcccggtggagaggtccccacggggcagccaccaaggccccaggtcagcagctcagagcactgccaagtcctggctcctgaggccacctccgtgccttaagtgccttgaccaaagtctggacgtgcctgtccttccgtcctccctcaggacagtttccagggcacccgtaattcctctgacagactgccatcccaaaagtgcacccattctcctgggaggcctcaggccctcgtctagcagctgccgtaggctgggcccagtgatcccgccctgggcatgtggggtgggcttgttcatgcctggcccagcaccgagagcccctggtggggaggggctgatacagctgggcccacacctcccccacccaagtgcccatcctcgcccctcctgttgacccaggccacaatcttggcccagattcccccctgtgccctcctggcctgccttggttctgcaggcaaccccagccctgcatggccacgtctgggcagaccggcacccctaccctgacacccatctgtgccagtcctgcacggcaaacacctcagagcccaggcctgcctaccctcccggagctgctgccaccctgtgggccaagggcaaagggacgtggaggaggggcccaagggcagggagggcttcctaaagcagggaccatctgagctgggtcttgacagctgcgtaggagtttgcagctggagatgagtgacgtgccccatggtcccttctcccatcatcctctggggccagagtgggtgacacatgggcactgtccaaatccccttcttcaccccataattagtcagcagccacatctggccacttctgtcctctaaacaccatttccatccctccccactcccactgccaggcctcagagtctcagagcagccccctctgtctccggagcagatctctgctgacacccttgcctgcactgcctcccagcacccctccctcatgcctgtgctcacctccaccaggactctcctgctcaccaccgctcccccacccctcagtccacggctcagacccatctctggccaccgcagcccctgtctgtgtctgaacagactgtgaacgtcccgaggagccagcctctcctcccagcccccatactgtgtagttggagcagggtttggccctgcagagctcaaggcctggtcggggagctgccagggacacacagtggccatgtgttggggtcaacatcacagtggagcagcccaagggctggggaaccctaagg

SEQ ID NO: 375 - DNA, 29538 bp, Homo sapiens
  source 1..29538: mol_type = genomic DNA
gctctgggctttcgagggcgggcgagtgggtagagttgggcaggtttagtgggggagttctgtggttccgagctaggcgggtctgggattcctagggtaaggggtctagaatttggaggcccggggcggggagggggtaggcctgggtttccgggtgtgggaggcgggtctggggttccgaaggcagatggggaggaggggtcctgtccgggatcggaagcgcggacgggcctggggttccgcggtcgggggtcgtgctcaccggggaccgggtcagtggctcgcgctgcgccgcccggcttcctggggttgcctgggacaacgtgctggggcggccacgcgcattgtgcacccccggtgcggcggctgctgggcccgtggcctcgggctgtgcagcggcggcggccccggggcgtggggctgcgcgggcggcggggggcgcgggggcgcggggagctgcggcgtgcggggggcgcgggccccgacgggcagcagtcatcagcgcttgggctgggcccgggttggggtccgggtcccgggctgctgtcggagcaggcgcggctgcggggtcggcggcgcgggacggtgcgcgccatggtgtccgccgggggagggcccgagtgtagccccgggtcacgcgctgcggccccgcgcccccctgtggaggtcacactccatcccccaccaggtcacaaagacccgcgggtcacatcctgcccctccccctcgggccccccaggcccgccaggccttctcgccctccccggggccctcatgccgccctctgtccctgggcccttccccgacgcgaggctggagcggcggggtgaggaggccgcgggcgctgggctcctcccgggctgcgcgctgcgggtcctggcggatgggggcgacggggtgaccgtatcagcgccccccgtcctgcggcggaacttgggagggccttggtatccgcagaaccactcgtggggtcccacgccgctgccccccggggggttctgagcccacccaggtccacacggcccctgtcgtttccccccgcaccccgcggatcaccccgccagggcagctcgtgtctgatctggcatctcggagtgggggtaggaaagacacacctgccccaccaggaccctcactcctggcaactttccaaagcctagatgtcttcatttggttttaaatcaactttattttgcatttaacttcccaagacaccccaaaagggaggttctgccccgactctgaaggggctggtgggggacttgaagggggggagtgggagcgtcccctggcgggggtggttcccttccagctccctccctcttccccggggaatgccactgggctctcaccagaccccagtactggcctctaggggttacacaaatcagtgagtgaaaagctggccctccctccacccgcccctcctccctgtgtcccgatgtttttagacctgagtgagctgacgctgctgagacacaatattaaatagccacagccacgtctgcaagtcagcgtttattgctcaagcgtattaaacaaaaatgtagactgaaagagacagttcttttaaaccccatttttccggattttttaagcgctctaaaataagaaaataagaaagtgcaagccagcaaaaacgctccaagtgcctaattctgactctgaaacttgagctctctggtctgcccccaagaagacatcagcccgccccgggtcgtccctgtggctcccaccccattcccaggagcagaccccgccagcctcaaagctgcagggaggtgggggtggcctgcagacagggtggggtctgcatccggtaccagtgacagcagcctctcctctcccacggtggcgcttgtttggggctgtggccaaagtgtttgcccggcccctgactgtgtccttccggagctgccgaggactgcagagagggcctggcttgtcccctctaggagcagctgggaaggtgtcttgcctgcatcccccttcaatggttgaaaataatgattccacttgtcatgaacaccatgaaggtatcttggcagccagagtcactcctgttccgcagtgggaaacctgggagggtcctcaaaccccctggcagggtctgcaggccgccccatccagctgcatctcccaggcctcctggttctttgatcttgatggccccaggccacagatgcatctccgggcctttccagcagcccatgggggaccagtcaatacaccccacggcggtgaagagaaaacgttcatgtcttctcagatcagaaggaaagaaacaaaaccattgtgaaggaaaacacctgctggaaagtaattatcaaagtaacagcattccagtttcacagtcgccccaactcactgtggatttactgccgtcagctgggaggacccaggcgccctcgggacgaggagacgcagggaaacccactcctggccatggcactacccaaagccagtgttattctcacacccaactgtccctgcagcctggcaggtgggcagtgaccgcctgggctgtaccctaagaccccaaaacagcggagatggagaagaccgctgccctggggccttctcagtgaggatcaagacaaagtacttgctaggaggtagagggcgctgggtgaacctgtgagaattcctgggctctgacctgatctgtcctgcattttgagtaatgggagcaaacacaggagggaggggctcagcttcccccggtcactggggccagggagacgtggtccagccggtttacaaagccttggatgcagccccacccccaagaacactgcctgtcacagcagcggccacgtggcactccaagctgggcatgacagtgcccgggacgtgggcagcggccatgtggcactccaagctgggcatgacagtgcccgggacgtgggcagcggccacgtggcactccaagctgggcatgacagcacccaggacgtgggccggccagtgtggcggtggatccctctagaatgactgggtctaagtagggagacagggcaggcgacccggcgtggactggtgtggatttcacctgggagagcagcggcagcctgtgtcgcttgcgcccaggctctggaggaggggcccctgcggctcccgggccaggacagaggcgcccagccctgctctcactgtccaggaagagccgctgggcagcctgagcctggggcaggtgcaccttgcagggaagtgggtaagatcccactgggctgactgagtacccgggacagaccctaagcgtggagggaggaagcccggtcagagtgggcaggagacgcagggacccacagtctggtcaggtccagagagcccactccagcccaagccatgagagaggcaggaagaggagctggggccagttcaggggtggggctctcaagaggccgagccgggggcccttcctcggcctgggaagttgcggccatgctcctgctgttacgacacgggagccactcggagctgactgatctcactgaggcacagactagccaacattggcctattttaaaattaaactaccctaggaagtgaaaaccccacctgcagcctggtttgccctcacacaagggaaaagaggtgttagaagcagtagctcagggcgattaggggttgtgcgtttccatgcttggggccaggctgggcgctgccacccggtttccgcgtctgggggtcactgggccatttgcaccacgacggctctccaggctttctccttgtcgaactccttcagggggctcctggccacctgcaaccgagacaggaaaggtgttacttcaccagggccacctgtgcggcgggaaggtggacacgccactcggccacaggcagcgagcagccagcgttcagaagttttcttcgaatgtgaaggaagtggggaaactaacccctgggcctctgtggaaagagataaaagccttcacttcctcagtgtcccagaaacgcctgcatccccccccgcacacacggtttctaccgagcctgggatggagcagcccttcactcggccccttgccctggctctggggcggggagcggggggaggccgcccaaggttgggcatgtgcctgacggctgaggaagaaaacacttaaggcagaggtaaccagatgcctccaggcaaaagggaggacagcgccagccccagctgtccaccctgagccccagttgtccaccctgagccccagctgtccaccctgagccccagttgtccaccctgagccccagccacccaccctgagcccctgggccccagccgtccaccctaagccccagccatccaccctgagccccagccgtccaccctgagccccagccgcccaccctgagccccaaccgcccaccctgagcccaagccacccaccttgagccccagccgtccatcctgagccccagccgcccaccctgagccccagccgcccaccctgagcccctgggaccagcagttctgggatctggggagaacacctcatgcgtctgactctgggccttgctggtcacaacagaaacccaggcgggtctcatttcaggcccagggactgccgtcctagcagggagactgaccacagccaggaaaaatggcagcaaagcaactgaggaggcaggttaagggaacagcagtagggagggtggagggtgggggcgacggggtcagctgagaaacgagccaagggcaagagagcgtcctccgggacttagcgggcactggaggctctgcaccaaggttctgaggccggtggtgtgctgaacacaggagggcagggtgtgcagggcaagagcagcggccggtccgcccaggatggcctagaggtggggcaggactcagagccccgctgagtggctgcccaggtgtttgggcatcaaggtgacagtcctagtggtcactgcacctgagggtcagcgggcaggtttgcccaggggagcaccaccaggacccgtagctcggtggggggaagacgctgagcctctgcctttcagatgtgggggcagcaagacagtaggcagggcccgggggaacattgttcaggcagtgacagccagaagttgttgacaccccagctttacggagccccatgtgccaggctgggtgggcattgccttccctgcagaaccgcgtccccaccagagaccagggaaggaaacttcaggacctgtgggagtcctcacaaagccctcttctgtgtctctaagagcaaatctgaaagcattaagtccagaatatttcccagggatgggtctgggtttacccaggctttgtgtttgtatttttaaaagacattttacggctgggcgcggtggctcacgcctgtaattccagcactttgggaggccaaggcaggcggatcatgaggtcaggagttcgagaccagtctaaccaacatagtgaaaccccatctctactaaaaatagaaaaattagctgggcttggtggcgggtgcctgtagtcccagctactcgggaggctgaggcaggagaattgcttgaacccaggaggcggaggttgtggtgagccgtgatcgcgccactgcactccagtctgggtgacagactgagactccttctcaaaaaaaaaaaaaaaaaagaaaagaaagacattttacttcttcggggtttttctggggtgtttttaaaaatacaaagtggcacaatgaatcttcgagggccacgtcgtgtggccctcggaggccctcaccaggacaggagcccccaccgcaggcctctcacctccccagcgggtgctcctgtgggccactcacctccccagcacccctgaaacccacaggcctctcacctccctggctgagcacccctgtgggccactcacctccccagtgcccccaccccacaggcttctcacctccctggctgggccccccatgggccactcacctccccagcacctgcaccgcaggccactcacctccccggctgggcacccctgtgggctactcacctccccagcaccccctccccctgcaggccactcacctccccggctgggcacccctgtgggccactcacctccccagcttccccccaccccacaggcttctcacctccctggctgggcacccccgtgggccactcacctccccagtgccccctccccctgcaggccactcacctccccagccaggcgctcctgcgggccgttctgggtgtcccaggatgcaccctgcagccttgcactgaccttgaagcgcacgcactggatggcggtgcccgtgttgaggccggcctgcagcaggagcactagcagcagcagcagcagcagcacatcgtaggatggctgcaggcggaaggaggtgtgagcagagtggcccagccgccctccagcccaggagaccaaagctccctcgtgcccacggccttcacaaagagcaggtgccagggctcgagtcggagccccagtaacccaaacgcattgctatttcaacaacctgatgataatcattctagctcaattaatgaggtcaattctgctttaaattccatcagcttgtgttcaacatacaggaataaaagtgaccgagccactgccaggccccgtggacagtgctggctgctagtggtcaagtcgctccacccctcctgctccaacacgcgcaaggctcagtcccagagccagagagaatgtccgcgggaggcagaagcgctgaccgttccgtgtcagcaggatcctgagcggaggagacagggggcagccgtcctggggggatggggtgcacagacccccaacagcttcacccctgagcaccagctgctaggaaggaaggggcaggaggcagcgcggtgagctcggcagggaagaggatggagggagcggccgaggatgcagggggccagagagtgaccacggagcacccaaaaccctctgtgcccatggatagctttcccgtgttggctcaagaaaaacaaagcaactaaatgttaacacacaaaagagccaaacatctatccaatgtcactgctacaaaaagtaagagaagaaacagaacgaacagctcttctcaagttaacataaaacttttttttgcgacagtctccctctgtcacccaggctggcgtgcagtggcgcgatctcggctcgctgcaacctctacatcccaggttcaagcgattctcctgcctcaacctcgccagtagctgggattacaggtacccgccaccacgcccagctaattttcgtagttttagtagagacggggtttcaccatgttagccaggctggtctcctaacctcaggtgatctgcctgcttcggcctcccaaactgctgggattacaggcatgtgccactacgcccggcctggattttaagtaattattagaaagtctggtacttgtgttcccagctggagtttaccctggaggatggtaaaggcatgggccccatgtggtctttgctcttcggttgttgagacaccatttattgcaaagcctatgctttcctcagtctcaaaaaaaaaaaatccagagccattaaagaaaatattaatcaacttaactatttaaaaaaatagctttcacataacaaaaatcacaacaagcagaacaagaaatagccgccaggctgagaccaccatttgtatcctccatcacagatggagctggtctcccccggcaccagggttagcggaaaatggtcaggagacatgagcagagtccactgaaaaagcaatgcagacgtcctcatgctttgtaagaggtcctcgtcctcacccacattgagacggaggtgctcccacccgtgtcaccgaactccagcgtgacaccctctgtggggggctgtggagaagtgagcaccttcacgccattggcaggagggaaggtggacggcccccattgaggaggtcgccgagatttatcagcatgacagctgcacctaccctctacccagcagtctctctcctagctggatatcctaaagatgcgctgaggattcaaaaggaagatgcgtgcaggttgttcacggaggagttatttatagtagcagacggttggaaataactcagtttccatcactagggactggctgggttgaccgggcagtcaggagcgatgaaggaattcagaagagctctgatccccttgggtatcgagaaaacaccaggataaattattaagtttaaaaaaacaagcaaggggctgggcacggtggcagaagcctcctcatcccagcactttgggaggccaaggtgggcggatcgcttgagcccaggagctcatgaccagctcaggcgacagagtgagaccctgtctctgaaaaataaaataagtaaatacataattaaaaagcgaggtacatggctgggcacagtggctcacgtctgtaatcccagcacttcgggaggccaaggtgggcggatcgcttcagcccaggagctcatgaccagcccgggcaacagagtgagaccctgtctctgaaaaataaaataaataaatacataactaaaaagcgaggtatatggctgggcacggtggctcacgtctgtaatcctagcactttgggaggccgagacaggcagatcacttaaggtcaggagttcaagaccagcctggccaacatagtgaaaccctgtctctgctaaaagtacaaaaattagccgggtgtgttggcatatgcctgtaatcccagatgctccggaggctgaggcaggagaatcacttgaacccaggaggcagaggttgcagtgagccaagactgtgccactgcactccagcctgggagacagagtgagactctatcttaaaaaaaaaaaaatggcaaggtacagaatagtgattctagtatacaagctattttgtaagaaagaaaaaaaaattatcatctggttgcccataagaggagcaggtcagtcaggcatgagaccacagcttttctgagctcgtcttttatagtttggcttttgaaccacataaatattttatatattcaaaaaataccattttaaaaagaaaaaaagcaccaagccctaaaatggaatacaaccagaggccattaaacttaatggggtatcgaacccagaggataaccccacacagaaaggggccgacttcgatggcgtgtggccgtcccctgctagcagaatgcatgctgaagataaaagggaagcctcaggctcactcaggagatggcccctgggtggtaatattgtctcttgtaatcgtgaacaattatatgcatattgtaagacaacatgaagtaggagatatattaaatgtcacaggaaacaaaataattggagtaggagtgggtgaagcaaacacaagagaagtgaagaaaaaaccctgggccgggtgttgtagctcactcctgtaatcccagcacctgtgggaggccgaggacgctatcccccttcagacagtgactccatgcccccatcagacagtgactccatcccccatcagacagtgactccattaccccattagacagtgactccatcccccgtcagacagtgactccatcccccgtcagacagtgactccatcccccgtcaggcagtgactctatcccctgtcaggcagtgactccatcccccgtcaggcagtgactccatccccccatcaggcagtgactctatcccctgtcaggcagtgactccatccccctgtcaggcagtgactccatccccccatcaggcagtgactccatccccccgtcaggcagtgactccatcccccgtcaggcagtgactccatcccccatcagtgactccatcccccatcagacagtgactccatcccccatcagacagtgactccatcccccatcaggcagtgaccccatcctccatcagacagtgactccatccatccatcagacagtgactccatccatccatcagacagtgactccatcccccatcagacagtgactccatcccccatcagacagtgactccatcccccatcagacagtgactccatccccccatcaggcagtgactccattccccatcagcacacgcatgttgacctggagcaaacagcttaatacaggtcttctaatgatttgggtgcaaaaccacttatactggaaaaaaaaaaacaaaaaaacaaaaaaacactaggtatctaagaaatacatctagctacacgtgcctgagcctcagaagtcgtgttggagataagctcctactgggtcagctcaaagtaacaggactttgaattctccttaaattcacctgttaaactcaatgcagttctgatgcaaatccgaaaagcatgtctcataaacccaggacagattctaaaatgggctcagggacagagtgggtcccaggtccctgtgaagcaggtggtggccccagatacagggcggaatcgaggccccgaggccctggggccaggctggcattggggagcacggtcaccgctgcccaggaacagcggaggaggtgcctcctggagctgtccctggagccagcgcccccagagtcccaggcaaagccagcaagggccaggccaacacgcagagcaccacatgtctggggggctctgaaataaaatacaactcacttttatggctggcgggtaatccttaaacatctccacgattctcatgatgctgaatgacagatatccagaggctgtgaacagcagcggagacgtgaggctgcttatggcaatcaggacctccacctggaaaaaaagcgcgggttgcaggaccacggccggagcctgggagcccaggacagcgggcgtggccagggctgggggggcgggcatggccgggcactcatgggcatagtcccaagctggttccctgcatgactcctgctgaaacctctgccttttcttttttctttttctttttttttttttttttttttgagacaagtctcgctgtgtcgccaggctggaatgcagtggcatgatcttggctcactgtaacctccgcctcccgggttcaagtgattctcctgcctcagcctcccgagtagctgggattacaggcgcccgccaccacacccagctaatttttgtatttttagtagagaccgtgttttgccacgttggtcaggctggtcttgaactcctgacctcaggtgatccacccacctcggcctcccaaagtgctgtgattacaggcatgagccaccgcgcccggcctgcctttctttcttttttgagaggcagcctagctgtgtagcccaggcaggagtgcggtggcacaatctctgatcactgcaacctctgcctcctgggttcaagcaattctcccgcctcggcctcttgagtagctgggattacagacatgcgccaccacacctggctaattgttttgtatttttagtagagacagggtttcaccatattgtcaggctggtcttcaactcctgaccttgtgatccacccaccttggcctcccaaagtgctgagattacaggcatgagcagcctgccttttcattcacagcacagtgccacaagttttgaaatacttaccatctaggcaaggtggctcacatctgtaatccaagcactttgggaggccgaggagggcggatcacctgaggtcacgagttcgagaccagcctggccaacatggtgaaacccccatctctactaaagatacaaaaactaagcgggtgtggtggcgcatgcctgtagtcccagctacttgggaggctgaggcaggagaatcgcttgaacccgggaggcagaggttacaatgagctgagatcgtaccactgcactccagcctgggtgacagagcaagactctgtctcaaacaaacaaaaccaagaaacaaaaaacatttacctgcaattctccactcttgaaaaaatagcccttccgcatgggtcacctccttcactgctctgaagtctgtccttttaacccaccccaaatcttcctgtttgacccatcaagtctcagagacagccttcactcatgccaagcatgggcagtcaccttgcaaagcactcagggtccacattttggcagcagtcattaacgatcgaccagttcaattgtttgcggtcagtttgtggcagtttcggccgggcgtggtggctcacaccggtaatcccagcactttgggaggttgaggtgagtggatcacctgaggtcaggagttcgagaccagcctggccaacatggtgaaaccccgtctctactaaaaatacaaaaattagccgggcatggtggcaggcgcctataatcccagctactcaggaggctgaggcaagagaatcacttgaacccgggaggcggaggttgcagtgagccaagatcgtgccattgcactccagcctgggggacaagagcgagactgcatctcaaaaaagaaaaaaaaacaatcgaccagccttaggaggtgcagatgatgctcagacactggtctccttccaagggttaggcacagagagcgcttccagtgtctacaccaccttgttcaggtctgcctgtccctgagaacagtccctgctgagcgggccagcctccacctcccacaaccccaccttcctcattgtgcaggccctgcagcccagtcactgcgctctcttgggctggagcctggtcacatggcaccaagggagggctaggccaggccctggccccgctcggtgggtccctggcacccagggctgaggggttcacccaccagacacttgctgggacactctgctgccacatgactggcaatggcacttggaaagcactaagagaaaagaaaaaggaaagattttagaggaaatagtcgaagaagtcgaattccaaacatgtgccctcccaccagtgacccctccatgcaggctgcctggctggcttgctgtggggggcaggggggatggtgcagtgcccaaaggcgcagctggggcagggacgggtccgcagggaagcaggggtagcctctcagaggttttgtgtgctctctgttcctcaaccattggtttaaaattttaagcctgtagaaaagctgcaagagcagtggagggggcatctgaggccccaaaatcaccagagtccttgacattcatatctgtgctctctccagctctcccagatagcctgatgcctgaacacctgagagtgctggctgagcccagggcacactcttgcacacacccaaagcaggaccacgctcgagagactccacgtggggccgatgtggtccatgcccagattcttccagttgtcctcatcatgttctttctttttaattttttaataatttttctttcttcttctcctttttttttttaagatggagtcttgctctgtcacccaggctggagtacggtggcgcgatcttgactcactgcaacctccacctcccaggttcaagcctcctgagtagctgggattataggcacccaccactacaccaggctaatgtttgtatttttagtagagacggggtttcgccttgttggccaggctggtctcgaactcctgacctcaggtgatccgcccgcctcggcctcccaaagtgctgggattacaggcatgagccaccgcacctggccctggtcatgttatttctagagctgtttgtttgtttgctcctgatccggattcggtctgccattgagctcgtagtctccttgtgggtccctgttaatcggggagtccctcagcctctgtcacctccgttacctggtcgcttctggggggtgcagcccatcagctgcagtcgggcctccgtgtgggacaggatttcctcatgatgagccttggggagcctcggaggagactctgcagtgccccagggtgtggactgccccttcctgatgacgctgacttgactcactgggttagggggatctgtaggttcctctgttggatgggcacctcttcctttttataaccaagaaatgcccttttcccacttattgtgaggagcctgccttagttccgcacaatgtaggcagagggaggatgcatgctcttcatcctcttcatctccccgaaggtgtccaggtgccagcaccccagcccggcctgctggggagggggctgcatcagccaggggctgtggtgagagggtgggcaggacagagatgggctccgagcaggggagcctgggcagcagggagaagactggggagctgaggggctgccagtgcaaaggccccaagccagctgctgaggtgggtgtggccctggccagggaggctgaggtgtcaatacaggggtctctcctgggcttggtgcttctgaaagggccttctagctgtaagcagcagtgagggcacaggaagggatggtggcttcagggtggcctattcagggccccagtgagccatgggagggcgggagtttccccgttcacccagcatggccactccggcccctgccctagagggccaggaagctcagccataggggctggggcagctcaatcaagggccctgccctggaagggtccaggcctgcagcccagcccccaactccagccccgagcacctgcctccagcccatggtgcagggcctgggcccctctgccgcacccaggccagactcaggcaggtggagctgggtccctcaccacgcatgcctcagcgctctcctctcctcctggggtctcctgccctgaagagagggttgggagtgtgggtggatttaggggcgcccagggggcagcacctgatgggcagggggtgctctccgggaagatggagagagcagagccacccccgaggcaggaggggtctgcgggatgggaggggcctctgtgatgagggctgactgcagggacagggaagggggtagggcaagtgcctttcattctcaactttttggaggtatgtggtctctgtcctccctcagcttcgggatgtaatccctgcgtttcagaccccagggtcagttgtacacacctgcaggcgtcattctctctgtcacagacccgcttgggtgggcacccatgtgagttctctgtctcagtagctgggcctggtcctaccccttccgggggtgtggctctatcccagctcggtcctgcctgggtctctttccctctctgagcgcctcagcagcccactaggtcgggcactggtgccctgggggcattgctctgtgcctactcgcccccacagggagctgaaacacagctgctgccaatgggatgtgtccacctggcaggcgtgggccccttctcggcagtccacccggccacaccgttcccgggcaggcgtgggccccttctccgcagtccacccggccataccattcccgggcaggcgtgggccccttctcggcagtccacctggccatactgctcccaggcaggcatgggcctcggcagcttcaggaagagccccactgctgcccaggaggagcctgtagctgatgctgggtgctcaccattcctgctcatgtacataagagagcaggggcaaaatctaaaagtccacacagcatgagacaaaccaggggctggccgtcaacaccggtgtgcaggccactacgcggcaaggtgctgagaacctcgtggggtctgcgtccggaggcaggtgggtggtggctctgggtgggctacaggctgtgaggggatctggggtgtggaggggttgctctagactcactgttctgagggaacacacctgtaatcccagcacttttgggggccgaggcaggcagatcacttgaggtcaggagttcaagaccagcctggccaacatggcaaaacccggtctctactaaaaatacaaaaaaattagctgggcatggtggtccacgcctgtaatcccagctacttgggaggctgaggtgggcaaattacttgaacccggggaggggcagaggttgtagtgaggtgatattgagccactgcactccagcctgggtggcagagtgagactccatctcaaaaaaataaataaataaaataaataaaacaatgcccatgtattgagcatgtggcatgtgtcaggtgctgtgtgacacatctgctgcagtaacatttaatgtaaagtaataacagaaatatgctgcattgtatgaaacacatagtgtaatataaatgcattatatattagaaaattatatagaataataaacatctacagcctgacattcatatgttaaaaagattagaataataaaaataattggtatttttttcaggaaaaataatataaaataatcacacaaactaatataaaagcagttaatactttgactcatttaatccttaactccccagttcttctgaagttgggggccagcgaggaccctctgtggtgactctctgtctgaatgcaccaagactgagctcggggcccagccacgcaggatctgagcagtgtggcccagagcggcggcgggcgggccagaggggttactcacggccactaggatccaaaagaacgtcactgagaggtgtgggcctgaaactgagtcatccacgttcagggcaatgatccccccgaggacggcagagatgcctgcgattacctcgacgacctggaggggacaggacagcatcggctcataaggaagtggagacacccccagattcccagaatgcactgtgcagacatggacccccaggagcagggtccagtgggctggccccagatctaaccgtggaggagcccacctggatggacccccagcctcacctggcccagaccccctctgccctcagctgcggcttttcacgtccctcctggagtaaaatagccaaagaggtgtttcccccactgctgcttttgtccacagaaactgagggtattgacctgacagtggtgagggcagaaaaccaagaccctcagactcccttccctgtctcacagtgtggcaggcggcggtgctcagaccctggaccccatcgaagggactcgggaaaacaggcctggggcagaagtagcttcccataggacacacccacccgtgccatgtgggtttgccattgccacggcaacactggacgtcaccacccctttccgtggcaatgatccaaccacctggacgttagcaccccttttctagaaatttctgcataatctgccccttaattagcatatacttaaaagtgggtataaataggaggcagagctgtctctgagctgctgctcgaggcacctgccggttggagagccctgctatactgccactgcaaacaaagctgctgtctgtcacctccagctcgcccttgaattctttcctggacaaagccaagaaccctgctggcctaagccctggttgtggactcatctgcccggcaccatcagggccgcaaccagcaccgccagactcagggaggggccgcaaccagcaccgccagactcagggaggggccgcaaccagcaccgccagactcagggaggggccgcaaccagcaccgccagactcagggagggctggggaagaaacacacgcccgaaaacctgctcccgtgaaggatctctgtgagtcgcaaacacagagctgtggccagcaggaaagccaggcataaggagtgggccagcaagggcttgggggccggaagggacctgggcagccaggccttgcgtccagaaggcacaaaactccagatgcacaaataaagctgaattcccagccaggcacggcggctcatgcctgtaatcctagcactttgggaggccgaggcagacggatcgtgaggtcaggagtttgagtacagcctggccaacatggtaaaccccgtctctactaaaaataacaaaaattagctgggcgtggtggcgggcacctgtaatcccagctactcgggaggctgaggcgggagaatcgcttcaactcaggaggcagaggttgcagtgaaccaagatcacaccactgcactctagcctgggcaacagcaggactccatctcaaaaaaaaaggaaaaaaaaaaaagaagcagaacggaaatggaacctaagagaggactgaaatgctaaataaggggaagtgaaggcactgggaaacacacacagacacagtcaagcacacaggaggctgtcccattgttggagtaaaaaggcaaaatgtcactaaatgtcacaagctagacaacaaggccaaggcggagggaagggggacagaccccgcatggtctgtttatcaaggagcgtattagaatatgaagggcaacccccaaaagaatactgaaaaatttcccatccaaaattagagggaaaaggaaggacggagcctctgccaattcaaaagaaggcagggaaggagggaaaaaggcaaaatcagggaaaatggaaaactcaaaagatggtaaaaataagtagaaatttatcagtaataactctcagaggaaatgggctacattcaaaaagctagggagagagaatgacaagataaagaacaaaatacagttacgtgctgcttataacaattataccaaagtacaaggcaagaaaagttgaaagtaagaaggagaaagaggccaggtgcggtggctcacacctgtaatcccagcactttggaaggcctgggtgggtggatcacttgaggtcaggagttcgagaccagcctggccaacatgccgaaaccctgcctctactaaaaataaaataattagccgggcgtggtggcatgtgcctgtagtcccagctcctcaggaggctgaggcaggagaattacttgaacctgggaggcagaggtggcggtgagctgagatagcaccactgcaccccagcctggctgatggagtgagactccgtctcaaaaaaaaaaaaaaaattcctcggggacaacagtgtcaactcacctacggcagtaacaaactccccctaaaaattacaggacaccagcagcacctttcgcgataaggaaggttattaccaatgataccaataacagactagagtctccacagatgaggcgcacgccgccatgcggtgtagacagccaactcttcgccaactcggaatcgaaacgtgacgtttaatccagcctcagtcacccccgacagagtatgagagaaaagagaaagaagggaagttttcttactgagtaagatttcaggacccgagcaggaaatggcacttcgtccagaatgttggcgctgtcagacatggagccctacgaagaaacagaactgtcaccccgggtgcacgggcacagggactcagcactgccgctggcatccggccgccgtgggcagtgggtcaggtcagcctgccgtgtagatgcgagaccgccttggaggcgcccgtggatctttgggcttgaggaaatgttcacacacattgtccttgcatatgaaaattagcagatgtggtgtctcctggtgatcccctggggacgagcactggactgagtcaggcttagggggaggggagggtacagcatctgtcttcacctccctgtagccagcggccgccaacccctcacccagctccagagcccctcctggccggggtttctgagacccaggagagaggggtctcatgggaatgccctggagcagcccagatcggccctccgagggtgacgctgagacccacctcgctcaccctggggtgatgcctctgcaccccctgccctgcggggtcagaagctgcacccaccttctttttcttgcagtcctcctcgctggaccgtgcagcgatgatcaccgtggccgccatgagcagctccagcaggagcagcaggatgaggttgaagttgatctgccaaggggcacacacgcttcagcaccgggcccgcctttctcacgccaccgcgcttcagcgtccaccggaccacctcacgggcaggctgcgcaggactctcagccacggtccccacttttcccatccagggccagctgtgaggcactgtgggctgcacactctcctgcctcacatgggcctttggggtcttttagtttttaaaaccattcttagtgcaaaggctgtacaaacacaggccagggctggatttggccttgggctctggtctaccgaccccattctgaacgctccttgttcccacaaaagccttcacggaatgtttagagtagcttcatgcatgattgtcaagcactgagaacataaggttttttggagggtaatgaaacgactgcaggccctgaccgtattggcagtgacatgaatttatatgtgtgttaatattcatagaagcatacattttaaaaagtcagtgtagctgtctgacaattttttttttttttttgagacggaggttcgctcttgttgcccaggctggagagcaaatggcgcaatctcggctcaccgcaacctctgcctcctgggttcaaatgattgtcctgcctcagcctcccgagtaagctggggttacaggcacctaccagcacgcccggctaattttgtatttttagtagagaggggtttctccatgttggtcaggctggtctcgaactcctgacctcaggtgttccgcccacctcggcctcccaaagtgctgagattacaggcgtgagccaccgcgcccggcctgacaatttttaaaatacatttaaaaaagaaagagtgcagaaccacattcaactaaaaacagagcctcgaaatatatgatgtcataacagagccacaggaagatgtagatatatcagtagaggtggggaaggacttgaaacacttttcttagaaactgacagatcaggcagagggaggcggctcacgcctgtgatcccagcactttgggggaccgaggcggttggatcacctgaggtcaggagttccagaccagcctgaccaacatggtgaaaccccttgtctactaaaaatacaaaaatcagctgggtacggtggcgcacgcctgtaatcccagctactcgggaggctgagacaggagaattgcttgaacccgagaggcggaggttgccgtgagccgagatggagccactgcactccagtctgggcgacagagcgagactgtctcaaaaaaaaaaaaaaatgacagatcaaaaagacaaaagcataaggagaactctaaaattcagaaaagtgtgacattaaccttgtcttttattttctgtatttctggtgctttgacctctggctccttcctgatcctgaagagacagctcctcccagggccagccgacagctacagtgagtaacttgcctctgagcagttcagatacaagccactgacccagggaccacaccccatctgctctccgtcttaataaagaagcgtcacaggccgggcgcggtggctcatacctgtaatcccagcactatgggaggccgaggtggatggatcacctgaggtcaggagtacaaggccagcctggccaacatggtgaaaccttgtctgtactaaaaatacaaaaattagccgagtgtggtggcacacgcctgtaatcccagctactccagaggctgaggcaggagaattgcttgaacccgggaggtagaggttgcagtgagccgagatggcgccactacactccagcctgggcgacagagcgagattccttctcaaaaacaaaacaaaacaaaacaaaaaggcagtgtgggtgttcccactgggtcctcctgtgtctgctcatttttcctgcccaacgagagtggccaggacatactcaagcctcctccagctttccccaatcatcaagtgcattccacatgtcacacaaagcaggaggccctccttgcagtatctcggatgaggtcctggtttcctttgggatttttgtctttttttttttttttttttttttgagacggagtcttgctctgtcttccaggctggagtgcagtggcgccatctcggctcccacaacctctgccccctacaatttcacatttttgtttagaggtgcattgaacaactgtcttacacagattggatgaaacatagtattatgtcactgttaatttttaaggactgttggaaaagacattgtttaccaataaatctgtcccgcagaatcacgagacttcaataaagacaattattttctttggatgcataaatctctcaactttagtcaaactcacgagctgtgaataacatttaccacctatttccagctcaacaaacatttgctgacaccattcgtgggagtggggctgtgggtgtcaggcgtctgcgcgaagctcgtgtgaactcacgtttattgctgatgggttcaggactagtttgcatccaaaccaaattaaacacgtagtggtcacagcaaacgtggaaacaaacaatatctgaaagttgggaatctgaaaaacaaggcaggaggggttttccttctttgaataataaaagaaaaaaggtaacagataaaccacacttcaggccattcactaaaaattatcctgattaggacataatggtggggagtcctgcgtgctcagcccgctctcccctctgtgcggcaaaggctgggctgggcaggagctttactgtctggggggcaacctcgggggcccctctcggtgccacaacgtctgtgcgtgggcacacacacaagcacacatgggcacactgtctgtcagcccctccggctttctccctggcagaggctgcctgcaagctagactcaccacattggcgttcctcctggagacggtgaagctcacaattgccgaggggatgcactggaatgaaaccggaatcccatgagcctgccgctcacctgagcaactgagactctgaaatactctaacatttgcgcttccagaaggatctgaatcatattcacaaaacagtgttgccagtccatgcaacacagtgggttggcttgactagaaggcccccaggtacttctcagttttaattttttcttgagatggggtctcactctgttgcccaagctgatcttaactttgggctcaaatgatctgttcacctcagcttcccaaagccctgcgattacaggcatgagccgctgcgcccaacccccaggtacttcaaaataatttattctgaaagaagtttttatttttctgatgtgctaaaaagatatttgttaatgaaggctcttctagctggataagctttgaagcctagaatgtaactcacgcaggcacaagacctggtctttgctgaaaattacccaaaaaaggaaaaagtatcagccgggtgcagtggctcacacctctagtcccaactactccggaggctgagctgggaggatctcttgagcccaggagttcgaggctgcagtgagctgtgaatactcggtgatagagtgagaccttgtctcaaaaaaagaaagaaagaaagaaagaaagaaagaaagaaagaaagaaagaaagaggaggtctggtgcagtggctcacacctgtaatcccagtactttgggaggctgaggcgggtggatcagagtcaggagtttgagaccagcctggccaacatagtgaaaccccatctctactaaaaatacaaaaaaaattagctgggcgtggtggcgggtgcctgtagtcccagctactcaggaggctgaggcaggagaattgcttgaacccaggaggtggaggttgcagtgagcagagacggcgccattgcactccagcctgtgtgacagagcaagactccgtcaaagaaagaaagaaagaaaaaaagaaagaaagaaagaggaaggaaggagcaaaggaagtagcaagactctgcatgtgagggaggcagaaaggagtcccacagccttcttgtcctcagccttcttgtccccacagggccacaccaaggctaggagtccagggccagggagggaggttgggacgtcagggacagggaggtggatggagtcgggccagcccaggcctgtggcccttgccgtgcagggccttgctcctgcagccatgggaccccgggccctgagtcgggggtgcaggccctgaggggctgagcacagcagtgctgggtgaggaggcagaagaagccccgtcggggcctgagcgaggggcagagctagggccaggacagccaggctcagctcagcacccactcaggtgccacgagggcccagggtagagaagaaaggccgggggcagggccgagtggggccaaggctgggcgggggtgggcacttgcccatatccggcagccgctgaggctgaaggggcacagctcacagctccactgggacaagggcggctcccatggtgaggataaaggccacggagaagcttccagagagggcagcagagtgggacgggtcacctgccccaaagggctttgttctaagggagcagagacccaggacagcacggggcggggcatccactttgtttttaagacatttcgggggcgctgctggggacagtcaccaacagtgtccctagagaaagggcaggggccagagacccagcaggcatgtggaagcgagaggaggggagagctcgggaccagctgaagcaggaggggcgtggggtccgcggcttgcgggccagaggggcatggggtccgcggcttgcgggccagaggggcatggggtgcgcggcttgcgggccagaggggcatggggtccatggcttgcgggccagagcccaggggtcagccagcatggtgctctagctgccgggacgctggggaggcagtggccggggttcacagaggaccaggggacagcggttgtctgtcctcccttgctctgaggatcagtgggtgcctccaccggccttggcactgtgtaagtttctaaaaacacaacatgaagctttgggaggatgtggggcacaggtcccagtcccctgagggcagatgctgccagctctggcaggacgcagccgcaggctcagaatcaacacgcaattccctgcacaggcgtctgcagagcaaggttcaggcctgcttcatcagtaattctcaaaggtgatgaactctacgtgaaactaaagtcatatgaagagttttttgtttttttcttgttgttgttgttttgagacgaagtttcactctcattgcccaggctggagtgcagtggcacaatctgggctcactgcaacctccgcctcccaggttcaagcgattctcctgcctcagcctcctgagtagctgggagtacaggcacccaccaccgcgcccagctaatttttgtatttttagtagagatggggtttgtccatgttggtcagactggtctcaaacacctgacctcaggtgatccacccacctccacccctcaaagtgctggcatgacagccatgagccactgtgcccggcccatatgaagaggtttgaatgaggtacaggtgacagaaacctgcacatctcagaacaaagaaaccagagcacgtgccggcgagcttgggcactggcagaggcgtggaggaagctgcttacagagcctgcagcacagcgcaagtaatccatctcagccgggaacacgttccccaggtacagcgaaaaccccgaggtcaccaggaggcagctctgcaagacagcgacagaatcccaggttacaacgcgccccgtccccaggctggaccctgacccttcaacttctgcttcactgtctgtgtattggtgactcacccacgtcccccagcatcaaccacacccgcacctgggacccgcccatcctggactcctcctgtaggacagacgcagccccgccgcagcccaggacatggaccagcctcccccagccatgtcggagcatggaccccccacgctgttatctggaggagagaagaaaggggatctgccaatatttagagcaaggaatggcacctctccccacaaaatactcctgccccaacatgttgtgcgtgcagtcttccagatcccacacccaggtccagacacgagactggaaaacaactgcccatccccctccgtctgcagaacctaatttccagatctggaagaagatccctccaggcaggggctccaggcccaggggctcctgagcagggaagaccctagcaggaggcagggagggtgctctctctcacgcacagcactgcaggggtgcggtggggagggggctctctctcacgcacagcacccccggggtgagtctgaggggagtcagtatcaaaggtcactgggacccagggtcctggcagaggaagcgaggtctggggcagaggggatctggcctgggcgggggaggggctgcgaccaagtccagggcaccaggtggaggagggcagagcccggagatggccaccaccacccgggagccgcctctgtccccagctccgaggcagacgcctgtcttggtggggcatgctcaggccacgggaggtgggcaggaccactgtgggtgctgcaggggctgccggcggaggccagggcacagggaggggagaaatcacagcctggatctcattctcagcccaagctacacggaaccgggggtccctgcatagaggcctgtcctgcagcatggctctgagcagctgcacacactcaggcccaagtggctcctccaatcatctctgtgcccacgactgtgcagggaatggccaggaccccagggaaatccctcggacatctggcgctgcccgtccaccccagacctgttcctttgttccccagctccctcccagccggcccctgaggccctccctaggaggaggaggtccctgaggttctctctgtgagggccgacctgaaggcctgagacgcctcctcccacctttgcaggtgacccctcagaggaccctgggcccccagagccgagggtcatggagactcctggggcccattcatggccctgggactgtccctaccctggtgggactaagccacaacctggagcagctcaaggctggcacaacagacacccataaattaataaaaataattgtgaaaacacaagcaaaacaagctcgtcggcatccaagagttctgcagcagcagggttagtctgagagttgctctctctgtcccacctggggctccagggcgctgcagtccgtcaccagagggaccagatgctcgtggccctccaagggcttagtgtggagctactcacccccatcagcacagagaagacccacgtcttgtggctgaagcaggggggcagtctcttcgacagctgcaggtcgctcggcttcgcgtctggggcatagctggcggggtcttgccggccccgctccagcgtgggcatccggtcataggccagctcctctctgaatggctcctgggtcatggcacttggggacaccacagctgtgctgaatgtacagccacgtgtcaccagttctttatctggaataaaattatcatcggctttggccactctgaggaaacttcaataagttgtttccaagaaatattttttaacaaaagaaatattgttcatactgaagtgctctaaatttgaagaagaaaatgagcacttgaatctaaaagtgaaaaagaaataactttcctagaaaaacggacctgaatagtctgggttcagggtgagattctacactttaaatgcctcattgatccatctgggccctccaggtgcaacacctgacaacatccatcggcaacttcgtccatgaacacatcacgccggggactcaagcacgttaaactgctccaattggtagctaaacgagagattgcaaaacatgcctctactcaacggcttaatgtctgagcacttacctcccccgctgctctgccgttgggagcactggtctctgggtgagggacttccagcaagaagtattcacaaatgaaacaaaagctcagcaaacttgagctgaaggcaggggaaggagagctgcttcctgaatatcaatgaggggaggaatcgggtggatcgtagaaatgtttcgtgttggttgtgtaaaccactgcctcggagctgtcagaacccaactaggaaaggaaggggccctgcctgtgccactcgccacagagctcgggtctctcagaagaaagaagcgtccctaagaatagaatcccaccaagtacacattctgagcaggctctgtttctgaaacgtaactgtttactcgaaggtcttctacatctttccaagtagcctttttccatcccccacagccacacggtgggaacctccttcacacggtcacataagcattcacgcactcggcttagctgtgtggccttgggcggctccggattcggccctgtggtttgcgtgggcagcccggatggctggtgggcccggtcctgctgccccctttatctctgctcaccaagcagagaaaaaccacagtaatgtgtgtcgcccagagacactggcaccctgacaactacagcaacgggttctttgtgcacattgtaaaaaggctcaaactaaagtttctgaaaaaccagctccttaaaccatgaacccacattaaaacttgagcaaagtcatcaggttccagaccatgggatgttctgttgtcttcgtttcaatcaagcaagaagcttttagtaagcttttattagcttttagtaagtttttattagcttttagtaagattacacatacaagcatccctgtcccagtgaaaatgcccactaaatcacctcgatcaaaatgcgtaagtgtcaagtacgcataaatgcagctcaaaacactttgctcaacctcacccccacaggaaacagcagtgataaatttttagcaataaacgaaagtttaagctatactagtattttagggttagttaattttgtgccagccaccacagccaatgttctgttgtcttcatttcaatcaagcaaggatgagaaataattttcaaaaactataatctgtgaagtcaagaactcattttaatggattgagaaacctcccaaacttcactatcttttaaagcgataaacgggattagtgggagtgggtccaactggatcgaatcctcctgtgtttctttttgtttggaaaaaaatgttaatcggatttcaacatttttttctttcaaaagttgctctccacttagaaatacaaacaagctgccctgaaccagaggttgcagagcaaatccctcagcttcccagatcataagtcatcacttgagaaatgctcccaagtttctgttggcaacactagtttctagaacaggccctgttctttcatacaatcttccaacaaattcttgctcctaaaatgcccttcatccctctgcctgctgatgtcccatcatcattcaacattcaacaaacatttatggggtggacaaagaagtgacgtccttcctataggctgtttacattcattgggggcacaggagtgcacaggataaacaaattagtgtgttatacagtgatatggtttggctgtgtccccactcaaatctcatcttgaattgtaattcccataattcctacatgtcgtggaaggggcccggtgggaggtaattgaatcatgggggtggttacccccatgctgctgttctcctgacaatgagtgaggtcttatgagatctgatggtcttttataaggggctttccccgcttttgctcaagacttctccttcctgccaccttgtgaagaaggacatgtttgcttccccttccaccatgattgtaagtttcctgaggcctcctcagccctgtggaactgtgagtcaattaaagctctttcctttataaggacttgactctaaaattacccagtcttgggtatgtccttatagcagcgtgagaacagactaatgcatccagtgacacacatgatttcctctatgagggaaaagaagtcaggggagagaaatgagggg

SEQ ID NO: 376 - DNA, 72567 bp, Homo sapiens
  source 1..72567: mol_type = genomic DNA
tgcaatctcggctcactgcaacctctgcctcctgggttcaagagattcttgtgactcagcctcccaagtagctgggtctacaggtgtgcactgtactttaggctaatttttgtgtttttactagagacagggtttcgccatgttgcccaggctggtcttgaactcctggcctcaaatgatccacccgcctcggcctcctaaagtgctgggattataggtgtgagccaccatgcctggccagaaagccctaccacgtttttacacatccatagtccttccactgcaccttggagggtctgggaaccctgaaggaaccactgtagaccttctttcactccatattcttactttaggagctcagacccaaaaccataccccgaaggcctaaaagaacctttctctggtaaggcacggggcagggaaagccacactctgatgctgggaatggatcttttggttccagagtagaagggagaagacatgctccagagtccccagcgctaagctgagcccagctgagtccccagctgctgcctgctgacaaaagtgatctcaatcagtggctgccacggtgatcctgtaatgtgggctgctcaggaatggaactcctgctcctctgggtggagctggagctggagcacagaggggacagatctgctcaaatggggccagtgacagctttgtctcctggaggttcactgagctctgccacactgaggccagagaaaaacccaccagagggaaactgggagatggcacgctggctcctgggaaaaaatgtctttgcctacatttttatttccgtccatccaaccatccatccatccatccatccatccatccatccatccatccatccacgcatccatccttccttccttccatccacccattaacccatccattgatccacccatccattcattcttccatccactcacccatctatccatccttcctaccatccatcctttccatccatccacccatctgcccttccttccctccttccgtccttccctccctcctttcctcctttccttccttccttccatccacccatcgatccatccatccttccatcctttcttccacccacccacccatctattcatccatggtccacccaaccaatcatccactcatccatcaaaccacccatccactcacccacccatctgttcatccatcatccatgcatccaccttatgaaaccaagttttcttctcaacccaaaccttgctgtctgcttccaagtagagagcacagcatcagaagcaggatgtgagccgaattctctgccctcttgaattgctggtagcatcgtctccagccttgctcacactccccacccccaccaggcttggtcccaaccctccttctctgttttggtcactgatctgggggcactgggacacgtagtcggggcagggggccccaggctacctcgcaagcctgcccactgactggacaggaggaaccaggcagatgcatgcgtctgctttcccatctgactttatttcactttttttttctataaaactcctccataatttcacaatttaacaaaagtttaaaatccaggaaagaaacaatcctgtaactcgttacaaacacgattctccttattccttttatccaggagttggtctcgggccgatgagtgtcctagttcctagtgagacacgttctttgtaaaaacccttatgggcaagaaaggtattcgataccatttgctttccggcgtcggtttacatttttgttcaggagagagcaaaacacagagatttgcactgggggcaggcggcttaacaggaaacacgtggcaatcacaaagtgccaggcccctttcctatggaagtgtccccagagccctcgtgggcccagccgccgggcagctggggtggggtgggagagcagctggggatgctgccttgggagcccatgctgcccagcacgtccatcaggtggtcacggagccagccctgggcccagagcagctctggaggacaacgtgaggccttccggccagaggaggtaactgagaactgggttggtgcttccggaggccttggaaacggcaggaagggccagacgccaccaccgagagcaggcgggggagcccgaccctcctctggctgagtggaaggctgctcgagtcgctgtgtggattttgggggactcctgcgaaggagaaaggccagcaccctgggctgaggttcctgtccgtgaccccggcggcctcttgtgcgtagagctcccagcagcacgggcccccggtcagcccccctcaggccagttccttcagtccaatgtcttagtttccagagaagaaaggaagcgccccatggtggagtattgttggccgccctgggaaggggagagggggcacaggggcctgccctcttcctgatacctgaaggcagtggggccgggagagaaacagagcaggtggcgaggagtcccggaggcttcctccgaaggttctcgggcctttccccgagagttctggggagtttccccaggacagctggcattgggggcagccttggaggcatgggtccccaccaaggagtgttcaggatctgctgacagaatcagagcagggacaagatgagggacctcagggagggacagatggagccccccaagtctgaactcataggctggggaggaggagacatctaggtgggttcgagggggtgcgagcccacctccaggccctcagccctcttttcctcataacttggtcagggcacaaggacttgaaaggacttgaaagtcagggggttgagaggactggaggcgcctcgagtcaatgtctgggaaacagaggctaaccaggcaggcctccagcccctgggacccccagccacgatgggctggctccgcgggagcgtcctggccctggaagagtgggccgggaaggaggaccggcttggcccctggagaatctcaggcataccaggagtggggctgcgggcgcggcaccagcatgaattgcggcggtggaggccggggcgggccaggccgcgaccagagagaaaggcagcctgggagggccagcccggccaacccaccgggcctgctgatggccgagcccacgctcgaggggctgaccagagttcaatgcgcctcagaaaactccataaactatcccgtcttatttggcaaaagctcatatttttttcaaagtttgaagacttgaatgaaagagaggaagaggagcctatgggaggaggccgagccccagggcggctgatgcgagtctgtccgcggagactgttggcgctagtctgagtagagcccgagagcagactggtggctcccgggcgccctgaggactcgctgccctttgtagtgttggctgacccccccgggagccccggtaggaggcggcggcatccttggaacggcaaagggagaattcctccatgcgcctggagagggccagctgccgtgcctggctcggcctccagccccacaccaccgcagagacatcttaacctacaagccccaccgtacgcaccccccacccaccccacgtgcactgctgccacagaaacgcacatggacactgctcttgaccagacagtgcacacacatatataatagagagaactatacagcacagaccccagcgcagcgcgagccggggaggagccggcgctaggtctacacggaggacgacgcagacacacaggcagggccttctgaggtccagggtgggcggagggtgtgttctgaaccattcgggaggctggagatgccccccagccgtcgatccgctgctcagaaaggctggggcagcgacgccgcacagcccgccgagcagtgggggctggtcccaaggctgggcgaggggcccccggccctgtctctgcccagagctgccttcaacaccagccgctctctgaggggagcccagagagcccggggggcggctcccgtgtggcccagcccggccccagggctcctggcgatggagcggggagagtgggcagggagccgccgaggaaagtgcagcgggctgtgcgggcgaggacagggctgtcgctaaggcagtgctgcgggcaggcgagacgggagaggagggcaggcgaggcctggctgcagcctcccaggaccccggcggtgggggcccggcacgcggcccagggtcatgtggccacggcctccaggcagctctgcagtttgcgcacggtggtctcgtccagggagaagaggtcgaagtcgaaggtggtgttggtgacattgaagtggccagtctcctcgatcagattcacaatctgtaaggtggtggcaggtggcttcaggggcagggggccaagggtggggttgccctgttccctaacagaggtaggggctcctggggcagcaccaggggcccccgcagcccacactcctcacaggcaccccgacctctgccgggcaggaccctcaggggggcgatacctgctgcagcacgttgcgctcccgcagcgccatcagcctccggtgtagctccaccagctcatccgtgtaggcctggggagggggggcaggtctcagcagcgtgtgggggccctggacccttcctgctcccatgcccagccccacccatgacccagtccatcccagcacaggacagaggtagccacatccaaaccaaggaaggcccaaggctgcaggggcagcccctcagctccaaggccacaccgggaggggaggaaggactgtccctgctcctgcccaggaagagtccaactgtggggtgttggggggctctggggtcctccactggctgcaactcccaccacccacccctccgtagcctccccgccttgtcgtaggtgcccccccaccttgtcgtaggtgcccttcttgaggatcttctcaggcttgctgcaggactcggggctcctccggcctgacacctgcagggaacccaggtctctgctgagctgtggcccacaccctccccagccccgaaggccccacaaaccctcctaggacagcccggcccagggctaagcccggcctctggtgcaccccctgcctgcaggccccaggctcaccttgctgttgggcgggggtggcttctgggggggtgggggctcacggctgggcagggaggagtcggcgctgttgtcactctcgctgtcgctgaagctcaacctgaaccgacacacgggggcgcatcaggcccctgccgccaccacggcccccaccccacccccaggctcaagcctctgccccgcacggagtcggtgcctgagcccacacacccccaacagctccattcacctctgcgcaggaacctcaacttaaaaatactgtgtgtggccaccaagaggaaagaaccccaaggaaaccaggccacccagaggccctttgggggccgcccgagcaggccaagagtgctccgggatacccgggacacaaagccccccagccaatgggccttgctgggctgtggtcctctgacttggttctgtggctttaacaaggggaggaggagctgcctgctgaaaacctgccctcttctcccagcactgccctagggcttccatggccgcccgtccctccgatgctcccctggccgcctgaccctggtttgctctggacagcaggcctccatcagtcacatcggcccccctgaccctagagggtgtggtcctaaacaggggtatctggtggtggggagaggtccaagctctcaacctcccctaccctggggggcaggtctttgacctctgcctcagtttccccatctgtgaaaggaggctgctatgaccacacacagagcctgggcccatttttctctcactctgcgtgcctggggtcccgctctgccagggatattttgggcttgatccagtgagaggggcccctgacaaccatcacttcacaacacgtttaaaacacagcaaaccccaggcctcctagtgaacaaggaggtgccagaagcggctcgagcacaccggacttcccggtgggcagcacagccattgtccctgttcctggcctgctcctgccccggcgcaggctccgttcatctcttaaacttgcccctcagtggcctcaggctggggccactctctgcagctgcctcccggctctggcagctccaggtctggctcacgttgcccaggcgacgcccctgcctgtgctcctgccggcctctgccccgcatcccacaggtgactgggatgacggctgggcaccgctgcagactgggcttcccaggcagcagaccagggtgtgcagaagctccgacggtgtggcctgggcgctccctgccccggcaacgcagggacaaggccggcaagccctcacccagggcccacacaaacgttccgggaggaatcaaaaggcgcttcgcgtgtggctcggtccctgtgccgtgcctgccagcccctctagaaccgaaccttccgtcagcctctctgcgctcacggctcttggcgcaagcagaatccaccctgaatgtcaccgaacgaggcgggagcctgcttccaggtcctgtcccagggacgccacagccctcctcgtgtctagagtctaagtccctgtcggagtcgtgggcccggacctcccaccagcggctcccccgcagtgagccactgctcctgctctgtctgcggtgggtgggaatcccgccatgtgcctgctggcctggcgcgctgcacacggggaaccaagcagaacctgctgcccagcttgcgtgaaggtggctttagtgaacaacacacctgcaggcgtctgtgaggctcccatgcaccttgctgggtgcagggtgataaccagccctgtctccagtaggagccactgaggcctggaggcctcagcctcacgggaggaggggctgactgccggctctgctacagctttggaaaagcctggacccccgcccgctgaagcctgtgtgcccggggccaaggccagcacgttctccactgtcgctgggttggaggccgagcgcatggagctctcccaggtggggtcacgccaagggtcctgcatatcccaaggatgtgcctcggcacccctgtgcctcctggggaaaaggccacaggcagccaaagctgctcccacactgggtgtccgctgccccaggacgggctctccatggatcctcgccccatgtaaggcaggtgggaaaggactgggagtctcctggcccaagagcagagaaacaggcctgctcccctccccccacctccagcctgggctccctcctgcacccctccctgccagatagcccacacctgccagtgaccacgaggagggatgccacccaaggccccagatgggggcagcccttgaggccctcagcctcagggaccaggagaggacacacagccccaggcccaccccaaggcccaggctggactggggccacctggggatggatccctgctttggccctcccaggggaccctccagtcccaaccccacctgcagccccacaatcactgcagacccagccggagtcgccccgggtggccgcctccgccccctggctcccaccgggccgtcacctggagtccctccccgggttggtcttgccggcagcctcctcgcctgacgaagagtcgtcctcgtcggactcctcggactgcaggtcctccaccatggagcgcaggggtcctggggaggcggggcagggagggaggggagacaagggcagggctccactgagcctccagggcccctcgcccatgaggccacgcagagcttcttgacactggtgacccccaaatgcacacgcccgtccacctgggggtccctgtgcccatctctaagaactgcccccacaccggcagccacccgcttcccctagaacgccctggctcccccacccctccctaccttcctggccctgctcgcaggcctcaggggactggccggcagtgggcgcgcagggcccctccattgctgcagccggaggagaacccctcctctgctcggggcacagagatcagaagctctgccgagagcccagggagggcgagggagccacagcctggctgggaagctgggcctggggtcacagatctctcttcctgcaccctacgccggcctgcccaccccctcggtaatcccctctgctgctcccagtccaccgtcctcccctttctccagaggcacacggttccagtcccctacagacggcatcttggtttatattcctgttaccaaggcaacagagggacacaaagccctcaattaccttagtcacatgatcccgcttcagtaggtccccctcccttcccggcagataagaacacttggagcgagtgtaggcttcaagggccccatcccccagccccctcggcaactgcacggctgaattccaggccagactccctccacaaccccgcacactcctctcccccagcccccctgcaaaggattccaggccaagggggaaggaggctcttgttccaatccaggagtggaaacgctttttgcctgggagtgggtgctggggtctggactggggccgggggctcagggcagctctcccactgtgtcctgcaggctgcctggtccccagggccctccccactctggggcaggctggtgcagccaatgggcctatgtcctttccccaaaaagccgcccctactcagggtggcctgcctggagagggagagggcactccaaacactccggcagcaggagaccccggccgtccacaggcagccagtgcctcgctggccctggggagcgggtgggatgggcggaggaggtgacgccgtccgtccatggtccccagcagcacagggagagttctggccatgggcagggccctcaccagaagcccctcaccagcctggctccaggcacggggtgcatgccaacagccaccacaaggaacagtgcccccgggcctgactggaggtctggtgacttgttcctgctttgcttttaaatatagactcccccaggccaccaaaaccctccatgtacagatctgcagggcccagcctgtgcaggcagtggacgctgaggaatgcccatgtggcctgagctccaggccctccccggccccatccgtgccccccagctgctctccatacacaccttggctgtggttctgggatggctcgaagtctgagtctgagctggagtctgagctggagctggagttggacgggcttgactgggcagacttcacccaatggtgggatgggcagggaggggagaaagggagagctgtcacctttcagcagagacaaagggggccccctggcagcagctacgctgagtgggtctcccccagacacccctagggtcccaagggtacccacgtgtgccgctgagaacccactaaggagccagcggccaggccatgcgcagcctatagcctcccgtgccagccctaggacacccgtggatgtctgggtttccggtagcgccaggagaccgtgtggaccacgtgggctctcctgtctacccaggcaggtgcacagggtactgggagggaggctggggcaggggcttgaagtcccacaggtgggtgggccttgccttcgtccaagagggcaggcattgactggtgtcgcaaaaatgtctggaacaggaaagctgggtgtggacacttcttgttctgacccagtgctgtccggggctcaggggtggcagagagctctgtatccccacccattcgctgctcctaccgccagctgcccaagacactgaagagcgtgcgtgcacaggggacagaagccatgggcaagcccggccccacccgcctcctcctcctgcagctgtccttccaggctcagccaccagggggcagtaaaagccacaacaaggacacaaggggtgggatgccaggacagagggtgacagtgcagggcaggcgtgtatggggcagaggcgtagctcctgggtggacgggaggcaggcactgcagacacctgcacggggaggggcccattgttctgggcccacatttctgccaatgagctcatcccaaggggtgtgccagaggacatggcgggcccagggcagccccctcaccttgggggcccgtctggtggaactaggtggcttgagcccctcagaccagtcccctccagggtcctccctccatcaggaggaggcagctggtctgctggattctggcaggggccgctgcagccgccagccatgcaagggaagccgtgaacggagtactgagctggtgggactcaggaccttgagtgcctgggagcccccggcccctcccctagcatgtggaggagacagcctccaccctgcagaagggtccccacgaaagcccaaggcctccccaagcagcaggtccagactcacccgtgcctgagagggaagagggacttcccaagggtttactgcagcccaacccagccccctcctgcccctcaaaccagcccctgccagcgccccttcccaccaacacatggcgctccctgatgaatcatcactgggaaagcctgccgtggtgcccatcagtcactgcccactcaggctacctgagtcccggacacataccccagagcgtccaggacccctggctgggcctgcctggagctgggtgatgcacagcctggacttctgttcttgggggccaggggtgagtaagaggtgaccgagagatggcctatttaaccccagccttctaaccagcaggccttgctactcagaacaaggccgtcctatgtcagcctcagttttcccagcaccgccagctgcctgcacaccgaggccaaggctagtcctcccttgacctccggatggaatccctggggcagaggggtgggcaccaacctggagggaggtggactggagaagtatccaaggtcctggccccatatcccatgcactttctcactaaaggtggagagggggcagttcaggcggccaaaggaggctgcacaaggtcagcagggatggaagcagagaggatgctgagccccgagaggcccccaagcctgtcctggcgccgtgccagacagaggaaagccagtcaggcacacgcatcccctttccttccgcccaaatccaaggggcagggaggaaaagaatccggaaatggtctcagccagaagagccctaaggtggtgtgatcagaagggccaccggagcacgcccggggctcagagggagggcggagcagactgggtccacgactgactccagatccccaagggccagggagaccccaaggcagcagctggaggacgtgggagctcggctcggggactcggcccaaagagtggccctacgagggtgggcgtgggccagaccccagctggtgcagattcttccgatggccggttctggtagcacagccacacacagcctctggggaggagcagcccaagacggccaaggggaagccaaggggccagtggtctggaaggccgatgtgcttcttcaccatagcagcctgggcttcggtgaagcccccgggggaagaggcgtcagggactctgtgctgttggggcctgggtctcactcccgcacagacctcggggcgctaagccgcattgctcaaaagcctctcagcacgcggggcgctcttcttcggccaggaggaagtcccaaagcctcctccagcaactccagcctcaaggccacccagccactctaagcagcggcgtccgaggtggcaggaagctccccacaaaatattccagctgtttcacaacactggtggcgggagccaggagccaactcactcactgccgggggccaggccgggtgagcagagcggagtggagcgggccgtggagctgccttgccgctgcccagcgtgctgcacacccagccccaggtaccagaagacctcgcctggagatgcctggcctgggactgcatgtcactcagtacctatccccaaccctggggtagaagggaggggacaagcgcctgcccagggctgtggttgctgcacaggcagagaaggggtcaggctcggtgcccagcaggcaccgccaggccctcccacagctgggagggctactgagatgggccgggacttctggaaggtggcaccggcccccccaccgcctcagggtcatagcagatggtgccgtcttcagccactgccaagccatgggagcaccgggcactcagccttgccagcccatgtgtctatgagccaggatgcactgttacccagaggctggaccgtcacccccagccagccccaccacctccatgagggccctgggggcaatgagcgctgcccacataaccccctcgggctttgtggctgggacctgcattcaaagccccagcggcttttcaaagcctcagcaacccagaggcaaagcttccttgagggcaagccggacccacaaaaggcccctgagggctggggctggcaacagaggtaaatggcccaaccctcatccatccattcattcatttttaccgggcccagtgtctgttgtctaaatgccaagtgccagataatagcgctggaagacaccaccgccgtcccaggccccaaacagggtctggccacaagaccatgaggtggctaccagctcttgcggctcaagtcatgtctgatgcagtcctctgagaatgtccggacgctgtgctgtgggacaagccagcagcctctcatggtgacaaggccggtccctgacaggggtcctcgttccaagctcagacactggtggggccagatgtgagtatccccaagtcacagctgtgtgcgatgggtgtgggcaggagggatgctcttgaccccaccagccacctaaatagggagccgggcacggacctgttgctcctcatggctaggggctgtctgaagccctcatcattaacctccagacaagggtgagtctcccagatgccctattggcagagctccaggccgggctgaccacgccatggtcagagcaaccatgagacacgcttgcccactggcaccagagcggccaagacccgggcccatgcagggggctgctggaggaggggagctcagaacctcaggaccacaccatcatgctttaccagagccacccacaaatgccaccgaggaggcgaggagggactcctcacgaggcagactttatcacctgacagacagggaaaccgaagcctagtgaggcgtggaggccccaggttacaagaagccagtgggaggagcagctggtgagacctgaggtcctggctcagatcccacctccttccgctgttccagaagggaggcgggtcccaccacactgcctgcacctggctgccctgcccccagcactcactcacctcggacttgaaggaggcctcgtcctctgagttggactcctccacctccagggcctttttggcctcccggggctcactctcggccttcaccttctcccctctggtgctgctcttgtccttggccggcttcttgtccgagaaggaggaggaggaggaggtgcggggcgaggtgcctggagcactccgggaccccttcgagctgctcttcttctgcttcttggcgctgggctttggcgagtcggcggtggccggccgcttgctggaagcccggggtgggggtgggggtgggggtgggggcccacccttgggggacgtgctttccagcttggtctctttcagggccatcttgggttccttgaaggcagccttgggcggtggcgccttctcctccttgggcagccggccctcgcccagcttccgcgaggtgtccttggagcttttggcctgctcacgctccagctccttggaggagctcttgctctcggagtctttgcggggccgctcccggtgctccttggtcaccttgtgtggcttggaggtcttgctgctctccttgttggcgtcctgcaaggccaagagcagggagggcaaggggagagacaaggtcacgtggcattgcggggcgccctgctccgccacccctgacccctacaaagcataatccacctgattcagcctcagctagagaaactcttccataaagcaaaaaggtaaggcagtaggtgagagttttacatggagctgtccctttaaactactaggaagtgtcagctggtccccggcagctgcaggctaagattcccctcagaattgaactgacattccctgagggattcaagaagagcacagggtgagtcaggcagagcatggccacttcgcccgcacccgcccgccctaacacctcacagctgggcctgggcaagtcagaggctgcgctggcactgcggggtgctggcgggcactggacgcagccctgcccctcatctcagcctccttcgcccagcactcatgctacgtgcgggaagctcagtgcttcctgctcggtcactcacgggcttcctttctgagccccgtcggcccctctccccaggactccacacccccagggtccagccagctcaggcctggcttcgggaagccaactgctgagcgcccactgggtccctgggtcccaggtaccgcacggagcaaacagctcccgggcttctcagaagggaaaccgcctgggtcgctttcctaaaacaccgaggacattcctaggtctctgcctcggaaaccccgggggtttagggtggagctggactcgggggctgatcccattgaggacagaggtaagatgatggcagagagcagcaggacacaggcccaggagtgagcccagctctgtgacctgcacaccacaggacccaggcagaaaaccgaagccatctgtgcctgcttcctcgaggaagggcaaggccaccacctcactgggcaatggcacaggccaggctggcagcgagcacacagtgtgggggctgccagcaccatggctgagttggctcagcccgcggccagcctgggcgctgctgcttgtatgctgtatgtttctgccctacaccccatccgataggcacactgccagcactccccacggtgggagccacgccttcaccttccctacagagaccctgtatcaccccacgcacccaggagcactgagcaggcttctctgctgttagccaccaggggctccacccttgctaggaaaggagcagcggccagcaggtgcacggcggccccagagcctgtccagacaattgtgtacctggcctcccggcacagaagccagcagcagccagatcccgaaggccctggggaggggctccgggagcagtgagagtaccagggaggaggggggccacgcttcacagatcccccaaagacatgcgggaggggcaggctgggtagaggcctctgaaaaccacctgagtgtccagggacagactcctcccagcaaaaaaccacagggcagacacagctgctgccccatggccagtctcctgggctggccatcttcttgcaaagccacagcccacattcagtgtcaaaggctcaggaacagtaccagtggctgtgaggcctctgccacctccttggagaaagggcaagccctgtgcccagcctggctcttccacctgggacagcgggagtgcccccagaatccccccagctggcctgggccatgcagggctatcagggggtgtccccttgggagctggggtgtggaatggggctgtgctccacagcaagctactacccaaggagggaggtgtgagagactgcaatgccacctgccaccctggcctcttccagcaggggacacacgcccagctgggctgcaggagctcagccggggtcacagccaccaagggcagaatgagagcaaactccaaaggcacgtcagaggcccctaacacaggtctcactgtgtgcccctggcctggagtcagctgagccgccattgccaccagggcctgcctggctagaaggagtcttcccacacaggagcacaggcacccgacaccacaggttctgaaattaggcactacgatttttttgtttgtttgtttgtttgcttttgttttgagacggagtcttgttatgtcgcccaggctggagtgcagtggtgcgatctcggctcactgcaagctccgcctcccgggttcatgccattctcctgcctcagcctcccgagtagctgggattacaggcgcccgccaccacgcccggctaactttttgtatttttagtagagacggggtttcaccgtgttagccaggatggtctccatctcctgacctcgtgatccgaattaggcactaaattttaagcataacatgagcactctccagggtgagaagccatcaaaatcacgtttgcaaggttgtctgcgaacctccacgggaaagagcaaccaggccaagtacctgacattacatgggtgacacctggctccctgcagctgctgccaggcaaggctgtgagagggtcctgccccctctatgaggctgtggttcctgcctgccacgccactcttgggtggtggctgtgaagtggggacaaaaccccaggactgagtcccctaaagctgccgcagctgcactcaccagcagtcccccggcctggggattctgatgggcaaggccccaaaaggcccacctatcccatctctctgggctcagggagccctgctgaggcccctctgcttggagcacatggcccggccactcactctccaggcagagagccagtgaccaaaggaggtcgctcagctggggaagaggccggttcatgggcctgtgccacccagggctccatggtggggccgacagctcattcgccaggctagggctcggggcagaggggctttctcagaatgccctcagcagacaagtgcctcggcaggaccccatgctgcccgatgctccccacagatgccgcctacatctctccacccggtagctggagaagcctccagggacggagagggtggagcccacaggcctcctaagcctggtggataaactcaccagctggggcctccaggggtctcagagacactccggcaaaagataccaccagcagccccagcagacgcagccccgccagccccagggagggcacctctccaaccaagaagtcctttctacgcagggttttaggtggcttgaagtgacccgtacagaagaaatcttgttgtggtagctgagagggacactgccaagatccccagcaagagcttttccttcattgagcctccacaaggctcagggagagataggccaggaggccgagtggggagaccccagggttccgtttcctactcagagaatctggcaagtctgacgatttctaagacctgctggccttggggaaagagccagaaagacctgcctgggtgctgcggttcttctcccgcatggctgacggtgagtctgtgaggcagctggagagccctgcctgtcctgcctgggatggctgggcccacacgcagggcctggcagacaagtgaggtgaggagaaaggagaggaccggtggagagatgtgtgggtggcaggcaccgggcagctgccccgagggcccgtgccgctcagcctccaggaacggctgtgctgagtgggcagctacagaggactggggcgtgctcaggggttaaagggacactgtgatgccatcaaagggctttctagcttgtcttctgaattgctgctcagggatggtttagagagagaagcctcagaaaggccgagtgccacccacctgaccgactgggccgagatgagaccgtaaaaagtttcttccacactgaaattcagctggcacccacctggcttcccctgcccttcccccacgaaactctgcagtgagccatagcccgagatgcaaagcctggcatagccaagggcagaagtagccccagctgccctcaggagggttgaagaggtgggtagctgcagcctagacagagacactctacccagcggccgccccaacagccttcggcgaaggtctcagggcttcaggccgagcagtcctggggccctgccatcacttggcagaacgggagaggactaggcagggtctctggcctcaagatgaacagggcaaagagcccatgatcacgggcttattcctgaaatcctagggaagcggcagtgcgcagcgaggggtgtgcagagagctcaaagaggaagacgccaagggagcgagcaggtgcggaaggcccagcccagtggagggagggcgccggggccagacccaccacagctgggccccggcgctcccacgcgactgggccttccgcctcactaaccttggagccgtgggatggtttggtcttcttggggtcagagaaggcagagagtggaattgtgggtaacatggggtagtcgggactgggcctggacaccgtgtctgctccttcgggcattaccatcacctagtgacagagaagagacagtcattatcgatgggcagggggcagggggcccacacgggccgggctgaaggtggtggggcttccctctgcaggaggggagaagggagagcctgagcgctttcccgaaagaatcccaggtgcttccctgctggggactgggtgctgagcacgcagaagaagcaggcatgggtggggagcgaagaaaagcccagggtcccaggatggctgggaccaggtggggccacgcggccttccgggaacagtggaccggagggctggcccaagaagacttgcggagcacactgagaatcatgagaaggcagctgcggccgaagcctgacctacgcgcttaggtttagggggaacagctcagaagtgtgagaggccagccagatgcctgcgaaaggcaggcagcaacttcccggggtgcacatgggtgcaactccagtgggtcccacgtgcccggagaatgagccgtccttggtgtgcggtgactgcagcggacccgaacagggcaagagcacccaggctgaggccgagaccaaggcagacgacctgtgcctactgggggggtctctctgcaaagcaggcccgagtgagccagcgagcctgcagcatggggcacctgctcctgcgctccatcagaggctacggatgacgaaagttctggggtccttccaggagggctcccaggaaacacctgctgtgcagggggaagctcggagcaaggtcttgagatatcaacactgcgagttaaggaatgccaccaccacagagaaaagcctcccagatggccgcaagagagaacaaaagaagaaaatacacttcaaaaaaaaagtattgaagtcggtagaagaagcactgctaacagccttgagcacctgcagttcccggccagccaagcctttcatctaaggacactgatgtcatgcggccatggggacattggctgaaaagaggccatgggcccctagggtccctgctctgagctgcttctcagagcctgtctgaccatgatagctcagcactgacagcatgtgtgccccagccgtccctgaaaacacgccacgggaggccctccacactctggagcacgcacatcacgcaagctcacggaggagccacagaaggctgccatgcacagacgggcttgccaggaggctgagccccattcgctctcaggcccattccttcgactctcatggtaatttaccttctttcccctcaaaacaatgccctagactgactgtttcaggatcacgcagtgtctcgctctagcacagaccgttgagaaaaaggaactgggaactgaacacgcagatgactcccacctccaacaagtgctgccaggaggaccaggctccccggcggaaacacagaccctcagccatgggggcagagacaagacacggtcctaaggggcacaaggctggaacggcggaaagtcctaccctctctcccattaccgatctccaagcaacccccagtgagaggagcagagaaagcagcgctcgctgacacagaaaccagcccctcctcccgggtctcccagcacccacggcggggggctggggtcacctgctgctagacggccactgcctggtcccgggaagccccgagaggagcccctgccaccgaggcctccggctgctcctaaggctgagagccccactccagggcaagccctggaggcctggaaagttcctgcccagacagccagctccccagacagcccaccctcagagggcagagcgcccagcgcctggggcagagaccccccacggcgcctgcttcagcctgcgcgtctctctgtggagccagcgctccctcctgactggcccttcctcccagccttgccccgcgcctcctccccgcccctggcttttatgtgttgagacgatgccctcagagccttcatcgctgtggagcaaaggaagccgcctcccacagggagccaggtcctggctgcagcccagagcggcccagggaacgccacttcccacagccacgccaccacggaacctccggggacgcccaaaaacacctactgcaaacgtggtgaaaacacctggccatgaaagaaggtggaaaagcggagccaggagggcgctgggacccagccctcacatcctcaggccacccagcactcagccacgccatccacataggcccacgccggcactgccctccccggatcagaaccacaagcagggcttcacaaggatcacagcaggactcactcaagcttctacatggacagacgcctccttcttcttaggagaacgacggccaccaaggacctgaccatgccccatgaggaggaaggaggactccccagcctgacacccacagccacggtgccccaaatccactcaggaggcgacccaccccacccgcataccccacacgtcatacatgccacatacacacctgacacattcacatactccccataacacacgtcacaccatacgtgcgtgacacaccacacacttcccgcaagtgacacgacacacacgccatgcacacaccatacatgacacagcagacagcgtatgtacataccacacaacacacacacacgccccacacccgtgacaccacacaccacacccctacatgccacacatgccacacactgtacatgccacaccccacacatacacacgacacacaccccataccatacatgccactcacaccatacacgagacacatgccacacacaacacacgtacatacacatgacacaccacacaccgcacacgacacacaacacgccaccccagcccgctccatcacaggctcaggctggcacccaggcaaaggctctgtggccctgggccctgaaggtggcattgctgttctgtgaccaggcctcagcctgcacgtccctccctccacgcccccctcctccataaccaccaccagccctgcgcccaccctgttgccaagagccctcgtggggaactctgagcccccacagggtccggagggctcgactccagccaccgcatgggggtcccggccacacgactcctggagagccctggtcccagagctggcactgtcgtctggcctcccgaagtcagaggtgatggcgatgcgcacggcaggggccctgtgcggaggccctgcccagctagttacaagccagctccaggcccagccacgcggtcagaccagcctcgcgcccatcccttcccagcacttcctgcaggaaggtgctaattacccatggccacccagaagcacagggtgaccagcaacgagtcacctgcagccaccacgccccggcacaggttgtggagctcccaggtcccctccagctctgctgggtgctgccgtgtgacctgcgccttgggtctcggcccccagcaccgacacctctggctgggcacagacggccgcagcaaagtagcctcggtggagcggccccttggcgggcaggggcggggcacactcaccccgccggcccgcaggagcttgtaccggaactccgtggtggggttgttgaaggtgagcttctcgcagcgcaggtggttcacgggcgggttgccttccaggttcaggaacaggtcgtaggtgaagcagaccttcctcggctcctcctgaaacagagaaaacaagaaagtctgcatcagagggtggccgtggtgcagggacacagctccccattggccctggtcctcccctctccctcactgggcctctgttcccctccctccgatttgcgcccacttctctctcagggcacctcctgccctgcccttattcaaaatcgaccagcttactatgtgcagctaactgggtcttgcaggccccatggcagaaagaaagctcattcatagccatgctctcggactgttatgggaaacatgtacccccttcaaccctcacagcgccactgacagacagggaaaccgacgcacagacaccaactaacacgtggcagcactgagacctgccccaggcctctgaggcccacaatctcaccacctctattccccacttcctttgcagccagggccaagcccgacagacgcaggacacaggacacagactcaaacgacagcacagcacccagagggggcaaaagtacaaggtcacgacccagtttccaggaggctctgtccactttgggtgccgccccgcaccctcgccaccccagaagacagggacgctcgcctggcatggggcaggcgctgatggattttccgcacgaaggtgtgaggagttgacagggtggcctggaaaagggctgtgagtgaggggctgtgatgaatacagaaaggccaggagggctcagggcaggcaggcttgcaggaaggagctgtctgcacgggctcctgtggaggcctagccacatgtgcaggggctgtgtttctgtgaaccttgaaatttcgaagcaagacatttttttttttgagatggagtcttgctctgttgcccaggctggagtgcagtggcgcgatctcggctcactgcaagctccacctccctggttcatgcctggagcctcccaagcagctgggactacaggcgcccgccaccacgtctggctaattttttgtattttcagtaaagacggggtttcaccatgttaaccaggatggtctccatctcctgacctcgtgacccacccgcctcagcctcccaaagtgctgggattacaggtgtgagccaccgcgcccagctgaagcaagacaatttcatctgcttttccttaagaaccctgccccatcccaaatgatgtaagccacaggtcccaggggagtgtgggaaaaccgcactatgacaagcacgaatgtcacacggaagaagggaggttttcatggaaacaacgtgcatgggccgggcgcggtggctcacgcctgtaacccagaactctgggaggttgaggcagacagatcacttgaggtcaggagtttgagaccagcctgggctacgtggcgaaaccctgtctccactaaaaatacaaaaattagccgagcatggtggtaggagcctgtaatcccagctactcgggagactgaggcaggagaatcacttgaatccggtaggcggaggttgcagtgagctaagattgcaccactgcactccagcctgggcgacagagaaagactctgtctgaaaaacaaacaaacaaacaaacaagcaaacaaacatgcaggctcatgtcctaacattatgggcagctggtgcttgacaagggtgacgacaccactcaatggggactgaggagtctcttcaaccaatggtgctgggacaactggatacccacccgggggagaatggtggtggccctactccacccacacacagaaaacaactcaaaatggatcagagacctggacgtaagcactaacgccacatagctctcagaagaaaatacaggtatcaatcacgacactgcattaggcaattgtttcttataatacaacaccaaaagcacaggcaactaaggaaaattagatcacgtgaacttcggaaacatttcaaaattttggcccaggcatcgtggtttatgcctgcaatcccagcactttgggaggctgaggcaaatgcagagacatggatgagttggtaccttggcgggtgggaagtgcaggagtggctctaacagacacagggtttcttttgggggtgatgaaaatatgctggaatttaaaacttgtgatgattgcacaacactgtgaatgtactaaaaccaccacatctgtacactttaaaaggctgaattttatggtaggtgaatcacaacgcactttgttaaaatgcagtccaccgggataaaaataactaagaggatgggcgtcccgtgaaggcttctgagttggggaacactgctgagaagctcgagacatcacaccggctcagtcagcagtggggacgcaaggcagagctctgggcccggcgtcctctgcaccctctttattctcagccctttccccagcagcctaagctcgcaggtgtacggccacaccctcagtcctggtgagaggggacagaccaaggggctcgaggtgctgcagagtgccgtctctccccagcctgcctgcagtgccggacggctcacacgggtggcaccaggctccgcaagctccggggacaggcgcctcctgggagtcggggcccagctagtaacacagttggcagcggcagctcctgcggccgcccaggagtcccaagtgcacctgcatgggaaggagcctccagaaccacgagtccggtcagagcagacaagtgaacatgaacaggttcccgatccaaggccagcgggtgtggccgacagtgaccttgtgtggggaaagccctgatctcagaaaagtgggtctctgccccagccccaggcggggaggtgtgacctgtctgggccaggctagggctccctccccttgtccgaggggacatgtgacaggcttgggtaaggacatggaagggagggcggcctagggagggctttccttcccaagtcataaacaaaactgcagggacaaagtttctcaccacctctctttgtcctgccaaaacgcgagaggtggtgcctgtgggggcggcttccaccacaggactatgtggagggatgccaggccctggcgcctcttgccttcttgtcctgtaagaagaccagcccctacaggaagcccctgctacacagctggtccgagcaactgaatgtatccctaaccgacacgccccccgccaagtccacacttcccctacgcagctttccttgaggactcaaatgtggccacgtgcccctcctctgtggcccctgcctttaaggagacacttgtcccagtgggtccctgccaaactgggaacctggggctgtgaggactcctctcctgtcttcccccgaggtacgcagctggcctagttccaagtgagccaactgagtgagatgctagggcagactggaggggggatggtccagcagcaggggtgggaggggctgggaaggctccctggaggctgtggtggggctgaaggatggccaggagctggttggctcaagaagggtaagaggtggacgggtgcccaggctggaccgccaggagcacgcgtggcctcacacaggaaacagtggcatggactgcggtgtcctcgcgggacccccgggctccagcacagctgtggtggagacaggtggtgacgccgaccctggggagaagggccttggccgcccctgcggagggggagccctgtccggaggtggaggagggttttcagctcaggaacaacggtcacatccatgtctcaggaagccacaccctccggcctatggcgcaaaggcacttctgggcacagggctggctggaacctggcagataaaggggaacgaggtgggggaggagagctcttgtcctgcctttcctacagaagtgacaccactaggtgaacccggagaaggcaagcagctaacctgcacagactgtcctagctgacccaagaaggaccacgagagcatcctagcacctcaccatccacttggccgacagcagagacgtgggcagccacacagagagaccaagcctccagattcaggcccccaagacacggacacacgagtcagagggcgatcctgagtgccactgcatgtccacaagcagcaaaaaccagatggtaccaagctctgtgggacacatggtcctgactcttcaccaaatacatagcaaagcaaaaaaagagtgcttgaatgaaaagggggcgggagaatctagaaaggaatttaagagacaaaccaaagaatcacagcgtgtggatctcatcaatgtcctgattcaaacaaacaaacaaaaaaaaaaaacaagactttaaacactggcatattgagagactaagggattattaatcatcaattaatataaccaagtaacatggtaacataagagatgactaattcatgggtatggtcctggtagcactgtcttgttagaggccccttttgaaatatttacacatgaaatgaggatgtctgggatttgctccagaatgaccaggagggcagcgcaggctggaacgggcttggctgtgcagggaccacctttgggtgggtgacggctacgagggggtttgttgcatctgcctctgtaaatgcttccaactttccctggtaacttctgagtggacgctggcagcacggctgtgcagaggatgaacgtggctggggggcatcctcgtgcagaaagcctggggcctgagggacaccagcaggagcctggccacggtcctgcctcctaggcctcaggttcctcacgggcagcatggggggattcgctgcaatgccacagccacagtgctcagcaccctgcctatcacccacagaagccgtgagtgcccccacaaagcagcctgggctaagaagggcacctggggaggcgcagccagacggtaccaaagcactgggatgccccagggacgctccctagctctgcccactgcctggcacagggcaccctggggctcggaactgggtcctctcctctccacactcctggccacagctgtgcaccctggctgcacagcgagtccagccgcttctcccaagctcctcagccagcccctctctcctggaccacctgcctcctaaccgtcacccgcttccaccacagccccctttcaggcacggtatctccatgggctcagggctcaccctagcccaccaatggcctcgatgagcctggaggaggctccacatcctcggtgcagccagagggacatgctgccttcttccacgcctcctccacccagctcaccccttcctgacccccacccgcccttatcccggcctgctgctgtccccaggcacagagcacagctcactctctgccagctctccttacagtccaaagcatgtctgtcttctgtcccagcatcccactgacccatgaacaccacacacaatgggactgtcctgttttgttcctgatgggcctggtgctggactagcaccctgtctgctgaacatccctaaatactcatgtatccaccaaaaatgccacaggcgcctaccataagatcccagcagggatcacaagagagaagaggtctctaatcttacggatagtcagagcacaaaggcgaaacagccacgcagcagtgacaccagtgtgacaccaactgtaccgtgtcacagtgtctgcagagcgctgatggtgaccaggcactttctaagcactcagcggatacgaatgcttcacagccccaaacccaggggttcctggtgtccccccgtcacagatgaagatgctgaatcagacaggggatctgggcagcagcagagccagcgcaccccggcagaggttcttgggaagccccaggtcttggagaggttcctgttgcccacacaaaccaaacagggaaggcagccacgacgaggagacccggcatgttcacaactgcagagaggggcagcaccgaaaagcaaggaaggcaccccctgccggccaggtagaggtcacgccccgaagcaccctgcggccagcaccctgggattgagattggctgctggaagcggccagtgagtcacgggcactgggaatgactaaacggcatgccctctacacgagacctgggcctacaaagcttaggagcatcccagggggctgcggaccccttcctggctacccctggaaaccagcctcctgggagatgttgggatagcagctccttcatgcccctgaggcctggcagcaggctccgtgagcaatggcaaagtcaaaggtggctggccaaccagcccaggtgggacacccttagcgactccagccggactgtgctgtgacccactaatgtcagtagcctcctagagtcacgtgttcttgggccgggccaggtcgcgagcagctccccactcccaggctgctggccacgagccagcgtctctctggcctcgggaaactaagatgcagacgaactggccaaacaggtgcctgtgccaaaggctgcagcatgcaccatcccgtgcccggggtggggagtccaggcagcgagcccgccacgcctgctggtgctccttgggatgaggatcacaggcgccgagtggccaggctggccttggcacgaggcacagcaaggcaaaggccctgtggccggcgggccatgcgtggagcgcctgctgctgccaccacctctgagaggccacactccctctgccccacaccccacctggaggacacccagccttccctcccaatcctggatgtgaggggagagcaaccagccctcctgcaaggtcttcccgctcctgccgaccctggctgtctcctggccatctctgccccgccaagcttgtccagcggctgctcagcattcccctctgaggccccagggttcacagacacatgctgggcttaaaaaaacattttggccaggcgcggtggctcacgcctgtaatcccatcactttgggaggccgaggcaggtggatcacaaggtcaggagatcgagaccatcctggctaacacagtgaaaccccatctctactaaaaatacaaaaaaaaaaaaaaaaaattagctgggcgtggtggcggacgcctgtagtcccagctactcgggaggctgaggcaggagaatggcatgaacccaggaggcggagcttgcaatgatggagattgagccactccagcctgggcgactaagtgagactcttgtctcaaaaaaaaaaaaaaaaaaagatgcttaagagacgaagcaatcaagagaaatgcttgggcctggcacaatggctcatgcctgcaatcccggcactttgggaggctgaagtgggaggatcgctttgaggtcggaagtttgagtccagcctcatgcacacagtgagatctcatctctacaaaaaaaattttttttaattagctgagtgtagtagtgcacctgtagcaccagctactcaggaggctgaggcagaaggatcccttaagcccaggagttcgaggttgcaatgagctatgatcaggccactgcatgcaacctaggcaagagtgagaccctgacttaaagagggaaagacagagagaagctccaaccttacttgaatcctgacatgaacacgttaattttaaaagacgtatgtccacacacacagagcttccctcagtttttgcagggaactagctgcaggctctagagagctgactgtgtgtgtgagagatgataggggaaactgatggtattgggcatgtgataatgttaaagaattactaatttaccaatttctagccagaatgatattgtggttagggtttttgttttaagaatcttatcttacaggcacagcaggaaatattagcagattagtagacgtgatgtctaggacctgattcaaaacaacccttgcggggagagaggagaaagcaccccatgcaggctggcggctgtgggagccggaggtggggggcggctgctctgccattctctctgcttctgtgtatgctttttacgtcatctatattagaaaggagaattaaatagataagcttggcttggcccccagcctgcctcacagctctcaatttgaattcaacaccacctgtgtcccttccaccctgcccctgtcctggagctgggaagacagtggggaaccaggcaagtccccgccatggagcccagatggagccctccgccagggccttctccagccagcagcaaacaccttctccgccagggccttctccggccagcagcaaacgccttctccaccagggccttctccggccagcagccaaacgcctcctccgccagggccttctccggccagcagcaaacgccttgctctgcttcaggcggctaccttggaactaggcagcgagccctgtggggctgggtgtggggccacaggccttaccccgccacgccttagtcagtccacaccaacactccaggagggcatcactctctcaccagctgctaggagaggaagctcaggtttcgtggcatctggccatttaccgaagcctcacagaaccagtaagtgccaaacccactagtccacacatgaaaagcctctcgcgtccacagagccctgcccctcctctggacacagctgtaaggcactaggctctcgcgttcaccggtccacggcatactggaatggggctgacacacagtccggcaagaaagcaagggaagacagaaatgtggaaaaaagacgcccaagaggcaaacaacctcatccctgaaatcccacgtccaggatgcgatccgaccgaaatacccacagagtataaaccaacgtacgaggggtcaccgaggcacccctgcagagggagacccggagatgccaaatgtcccccctagtcagataaatgacagctgacacaaatgccagggaacacgacatggaccctggccagaaccaggcacagcggcctgtgctgacgccggagggccacgggcagggagttcagaggtgtgagtcacactcacgcccacacatgcacacacgcatgcgtacacacacccacacttacccacatgcacacctgtgtactcacacatgcacatgcacacacccacccacacacccatgtacacacactcatacacgtccatactcatccctcacctacctgtgtacaaacacacacacaaacacacccgtgtacacacacacccccacactcatacactcagacttacacacacacctatgtacatatacacacccactcacatccacacacctgtacacatacacactcacatgcacactcagactcacgcacacagagaactgttttggcaggacaaacattgcttatcatggagaggatttcaattccttgtaatctgcatatatcaccttggctttgtcatcaaaagaaaaacttttttttttttaaggcttaggtaaaacagcaccatgtgggctgaaaacctctgaccaggagtcagaggactcctggatgctgaagcggctcagcactggctcactgtgtgaccctggacgggctgctgcacctctctgagcctcagagagaggcaggaatcaaacaggaaagaggcagaaaggccaccggtgcctctggctgggaggacagtgtgggcagcattagcccaggccccttcacgcctgcctgaccgctcagcctgggaggccagggagaccccagaggccccgccccctcccacacatgtgctcagggcctgcagccccatgtgaaacagcgaaagccagccacctacaggcctgcctggaagaggctggccctggtcaggggaggcgggggagttttcttcttgtacccctgaacttcaaactccactgtggagcacgctgccgccactggaaggagctcgacagacacagcaggtgacgcagagggcgggctccaagcggagctggcacccggcgcaggtgacgttgcccatctgtgctcagcgtcctcacctgtgaagtgggaaaggcagaacccaccccatatacaggcactcaagtgctactcctcatcacacgctggcccagagacccccgggatacaccgttgggagaagaaagcaaaccacgagactgagagcaccacggaaccctacagctctcagattcaaaagcgctgtgggggtgatgtcagacgcacagggagagactggaccccacactcagctacgaacctcccgagacagcaggagaattcaggggcagagggaaggaaaagggaggagctccagttcctaccctgcgtccttctgtgcttcgcatttccgataaccagaatcaattcctgcatcgatgagcaattagaaaccaaaaggaggaggcagaaatgcagacaccacattttaaaatgctctccatggaaacagacgtttttagacttaaagtttggcttctattaactggaagccaaacttaatgatttctcctcagtctgacaccagaaaaggcagaaagcagccagcaacgtaaacacctgtaaaatggcagtttgaaatctggaccataacaaatgaagacaggaggaggtatccccaagatgagcccatgaaagtcaccggcccaatgctgccaggctgagagcagctgagctgagacctgcgagtggtcagtcccggggcctcctgcctccctcatgcccagtatgaggacagcctctctctaccctgaactgaggccgccggaacccacagctcctagacccccgccccatcccgagagcccgtgtcccccaagccactgccaggcagagtccagctggaggcagggtccattcagggctccagggcgccaggcccctagcacccccgctggacagcaccttccctgctctgggagccacagggcagatgccttcgtcctgtacaggaggcacaaacagtcggaaagatggcctcagagaagccaggaaagaattttatcaggtacatgccgagataggaaattggggaacataatgggcgctttcaatgcccagccaattcttccagccccttctctagggacccaggagaaggcattctgggcctctgggccgtcccaccgtcccagccttggaggtcctggggtggccgtggcgggcgcagggttgcgcagcacctcctctctccctgcagcgatgggcaccttcgttctttccttgtgcttctctgcccggctccagacccgccctctaggaaacacagatgcatctggggacccacttcagggaacagaaggatgctctggggaaagacagactgcgccacagctggcacgcatccatgcggcttgtcacaacgcggcagctcggccctgccctgggtccccgcacacaatgtggcttctgttctggctccctcggcaatccaccagccaaggcctccccctcggccacatcaaccggccgattgtccctggcggagcgctctatgggctcaccagaggggctgcccgcctcctgaactctgcaaggccctgggagcctgggagccagggagggagttgcttgcagaagcgttgctccgcttctgcgccagcaggtcaggggcaaggggagaagacaatgggggctcagagggggctccctgcctcccagcctccctgcctcaagacctgctctccccagtctcaaactgagcgcacgcaggggcagcccaagtggaacccatatagggcagcatttgcagctaagagccatctccactctacagagggtggcggctatggagggcaccccggcttggtgtccttggaacctcccctgtcatgtgcgactgcctagggccccccaacacaagccacccaggatgtgtcaggaagatgcctctgagggtcttaaggctatgaggccagtgcggtttaacttacttttaaaactctccacgtaatgcccttcctgtgccctcggacatctgcgtgtgggaggccacggtggactggtgatggctgtggctccctgtccaatgacagcttgttgcaggggttggggaggaggtctaatattagtggcaaataaccaaaataaacttctttttcacacttggccatttctaacactggactgtctctcacaatcagtgtgtacccctcatgtgctttctctcctgctctcaggacgggttccttcaattgaagtcacgggagacttagactgaaggaagaggaatctggcgtcaggggcagggcaagttttaccgccccaaacagccacactcccctttcctggtgctgttggtaccgggttcaatagaaacaagtgccccggccagcatcccctcatgtgactgcatctacagggcacctggggggctgcgagccgacaccggccacaggagaggaaagcaggccactgtcatctcagatgacccctctccccatctgacagcagctctctctgcccctctcggttttgccaagcacaccaagccagaaacgcaggactacttggcagccagcactggcatgaaagcgacaaaggtgagagctaaaaggattgccaaggaaattaagtcacatcaaatgatgcctcagagaagagctcctgagtccagctgctgatcttggctaatgcctcaaaacaaagcaagacaaaaatcaaccatgctaaagtctgctgggaacgtaaagcgggaacgtggcggggtcaccaagcggtaaagctgaaagagaccccgagagccagtcccagcccgagcagggccatgcatgtcagtgggggcccccaccccgggaaggctcggggaggccggcagcccccggcccctgccctgcccaggaccagggcatcaaagcctcccaggtcagctctgcagcccctcccgaggccctcaccctgcctcctaactgactccagggcacagacaagcacttcctgtttggcagccactgaattccttctgggagagatggagccaggtctgcattataatgtcactgacctactccagaacatcatgggacaggcgtgggacaggcacctggctggggcttctgaagccacggccacagagcttacgcccaaagaggcaggtgaacccagaggactcgaccccttatgcaggatctaacagcaaatgccaccatgtcacccccagcggatgagcagctctgcccacccagctcacctccctcacactcgccccagccccgcttcatcacctggactctgcctttcaaacagctgcccctccccctagaagggaccaccccatcctctcagcctcacataagaagaagtcaatcggccgggcacggtggctcacgcctgtaatcccagcactttgggagaccgaggcaggtggatcacgaggtcaggaaaccgagaccatcctggctaacacggtgaaaccccctctctactaaaaatacaaaaaaattagccaggcatggtggcgggcgcctgtagtcccagccactcgggaggctgaggtaggagaaaggtgtgaacccaggaggcagggcttgcagtgagccgagatcacgccactgcactccagcctgggtgacagagcaagactccacctcaaaaaaaaaaaaaaaaaaaaaagaagtcaatctcgcttcttaagagaacccaaccgaccctttctaactgggtccccgtgacacactcatagcacccagcccctgggcttcctggaactcattctgatgggtcacttcctctcccgtgtgtctgccgtctcttgccctgtcagtctgtgaactccacaagagaggggaacgtgttcacttggtcttcactgggcctagacttggtaaatatctgacacatgaagaaatccatgaaactccagcaaagaatggaagaaaagcaattcctcctcctcactgtaaacgaacattaaaaaaaaaaaaaccctcatttgcgaagaataaatgacaagggcctcccttactagatacccactaccctttgacagtctcccccgcctctctcaacagtgggcttggtgcatgccgccagcggacagcgaaaacagaggcatgggcctcaagtgtggcaaagggtttcagacacaaaaccagaagcactcgccagaaaaacaacagtaagacgtccatcaaaataaaaaacgtttgctagacaaaaatatactattaagagaatgagaagataagccacagacttggagaaaatatttgcaactcatataccaagtacaggacttgtatccagagtatatacagaactcttaaaactcaacaacaagaaaacagctaacccaattttttttaatgagagggaagggcaaaattctgaacagatactttaccaaagagaatatatgggttgcaaataagcacatgaaaacgatgctcattaccgtcggccgtcagggagatgcaaatcaaaacctaaccaggtaccacttcacacccactaggacagacggctataatcaaaaaggcagaaaatgagttgctggtgaggatgtagaaaaatcagaaccctcatacccggctgggggggaatgtaaaatggcacagctgctgaaaaacagtctggcagttactcaaaaagttaaataaagaacggggccaggtgtgttggctcacgcctataatctcaacactctgggaggctgaggcaggaggatcacttgaggctgggggtttgagctcagccttagcaacatagtgagactctctaacaaaaaaaaatttttttaaatcttttctttttttcctttctttctttctttctttctttcttccatctttcctttctttctttctttttttttttttttaaagagatggggtttcaccatgttgcccaggctggtctcaacctcctgagctcaaacaatccttccacctcggcctcccaaagtgctgggattacaggtataagccgccgtgcccagcccttaaaaaagtttttttaataactcaccggatgtgagggccgggcacagtggctcacgcctgtaaactcagcactttgggaggccgaggtgggcggatcacgaggtcaggagatcgagaccatcctggctaacatggtgaaaccccgtctctactaaaaatacaaaaaaattagccgggcatgctggcaggcacctgtagtcccagctacttgggaggctgaggcaggagaatggcatgaacacgggaggcagagtttgcagtgagccaagattgtgccactgcactccagcctcggcgacagagcgagactccgtctcaaaaaataaacaaataaaatttttttttaaaaagaaaaactcactgggtgtggtggcatgcacctgtagtcccagctacttgggaggctaaggcaggaggactgcttaagtccaggagacagagctgtgtgagctgtgactgcaccactgcaccccatccagcctaagcgacacagtaaggccctgtctcaaaacagacaaacaaaaaacccaaaaagttggccggtcacagtggctcatgcctgtaatcccagctacttgagaggctgaggcaggagaatcgcttgaactcaggaggtggaggttgtagtgggctgatatcgcacctttgcactccagcctgggcaataagagcaaaactccacctcaaaaagaaaataaaaagaaaacaaagagaaaaaaaaaaaaaggaaaacaacctgaccatattcaagggctggcgaagatttggagcaacgggaactcttcctgctgatgaggctgcaaaatggcacagcccctttagaagaaaaccactgggcagtttcttaaaaagttaaatagacccatatcatgtgacctagcaatctccactcatttacccaaatgaactgaaaacgtggtcacacaaaaaacccgtatgcaaatgtttagggcagccttattcataatcacaagagctggaaacaacacagacgtccttcaacaggtgaacgaataaacaaaccgtaaggcacccatgcagcggaacactcctcgaaaaaacacaacaaaacacgaagattcattcatatggcaacatggacaaatctaagtgcgctttgctaagtgaaagaaaccagatacaaaagggctacatattgtctgagtcttatgacaatctggaaaaggtaaactacaagaatggcaaacagatgagcggttgtaagggctgggggtggggagggggactgacttcaaagggacagcaagtgggaatcggagtgggggaggcagagtcccggtagatacacgactctctgcatgttgaacccagagtaaacgtcacggaatacaaattaagaaatcagtaactaataaccggatgggcagagggggcagacccaagatgaaatgcaactgagactgacgaagctaactgtattacaaatgcatgacatgaccaccccagggaaagggctgccacaaataaccttgtacccttgcagcgttcctacttgacagaaagagctgcacgccaatgctgagccctagctgccaacacaggagggctggctgttgatgctgaaactactttccgggtatcctggaattaaacgggtaaacaaacacagtacagatatcgggagccaggtttcccccttcagagacagctacaaggcagcaactggggaaggcgtgaatgagcccgctggtgctggatggagttggcagcctcagaggaacgtacgtttgttttcatattacacagatagatacagaactaaacacagatgtaaagggtgggggtggtttcctagctctgtcatatgagagaacctaaacgcagtgacaactaagcagcagtgagcacacttagctcccagatcttggcttttaaataccattttccagcaacaggaactaaggctcctgggagcagcggaagattctagggctggggcagggaaatacacggtgagcctgtggtgccagaatgtgaaagcacccccaaaaccatgggaacatgaaatgacaggcccgaatgcgagaacaatttcaataacaaacaggtaacaacagactggattatgaccccaaagaaaaaccaaatacctatgaatccatccgtgttgatacaaataactgaatacataaatggaagagaagggacggctcttccttactgaaaaattccagttaataaatgtagaaaggaaggaggaaattaaaactaccagtaggccaccactgggggaggctaaaattagtgggtggtactatgggttaagtagccctcatccaaaatgcttgggatcagaaatgttttggatttcagatctttttttggattttcaaatgtctgcattattcttactggttcagcatccctaatctgaaaatctgcaatttaaaatgctccagtgagcagttcctttgagtgtcctgttggtgctcagagtttcagattttggagcattttggtgttttgtttgtttgtttgtttgtttgttttttgtgagacagagtctcactctgtgacccaggctggagtgcagtggtgtgatctcagctcactgcaacctcttcctcctgggcttaagcaattcttgtgcctcagcctcccaggtagctggaactacaggcgtgcgccaccacgccctgctaatttttgtatttttagcagagacggggtgccatgttggccaggctggtcttgaactcctgacctcaggtgattcactcgccttcgcctcccaaagtgctgggattacaagaatgagccactgtgcccagcctgagattttggagcattttttattttggatttctggattagggatactccatctgtatttttaaaaacagacaaaacaaaacaggttatctgcacagcttcaaagtatctctcccaaaatgggtattagtaactgtagtgtttttaacctacgcccaccaggatggaggggttaattcctctcccttgagtgtgggctggacttagtgacctgcttcttctaagcaacaaccagtggagaaacctggcagatgccacttaaccaggagatcaaggtcaacctcggctgttaaccatggatcatgttaatatctggcacttcctaatatgatggaagaggaagtgcatttacctctgtggtcttcttatggaactctatagccacggactagccatgagaaaacggcaagtagagggagagtctacataataccccactagcacatttcaaagatatcaaggtcatgaaagactgaggaaagagacacaggcaacagtgcagcatcctggggtgggttccacaacagaaaaagaacatgaattgaaaactgggaaacccaaggcaagtccctagtttagttcacggcgattgtactgatgctactgtcttggttttgatcactggaccatggttatgtgagatgttaacattaagggaggttgggttgtgggggaggtcctatgggaattctctgtactatctttgcagctcttctgtgtctaaaattatttccaaattaaaaaaatcgtaactatgagagattcccagtcaggaaccatactcggttcagtaacgaagatttttatgcgtctggagcagcttgggtgtgtgaatctacttctttgttcaactgtgaattttatggactctaaatacagatcaagcctttctgatgacgtttccatatccaaattgagacgtgcagcaagtataataaacagactgaatttcaaagacttggtatgaaaaaagaatgtaaaatctctcaatacttaaaaaatattgattacatgttgaaataatgttttagatacactgagttaacccaattactaaaattaatttcacctgtttcttttgaacttttttaacgcggctaaaaaataataataataataattaagatttctactggacagcccggggtctgagatgttactcactcactagaacaggaagggctttaaatatctctgaccacttccaggacaacaaacagatacaaagagagcatttaaacaagactccctcatctgactgggccaagtgcactgaggaaccgatttattcatccgggccactgccttgtcccggggcagccccagcatgtcctcccagcccacagtcaaggccactttccaaaagaacagttcagccgcagcatgcagaagcctcgaggccgcatgtgatgggagggaggccacccggatccccccttgaagagctggagcccccagctcagggaagttcccatcacacatccagtctgcccagcaagcgctttactgtcaatgcttaaaaataggcacttatccagaagatataaaggacccggtcaagcaaagtggctcgcgcctgtaatcccagcactttgggaagtctaggtgggcggatcgcttgagctcagaagttcaagaccagcctgggcaacatggcaagacctcatctctacaaaaatacaaaaattagccaggtatggtggtgcacacctgtggtcccagtcactcagaaggctgaggtgggaggattgcttgaggggagaggtggagtctgcaatgagctgttattacaccactgttctccagcctgggtgacagagtgagaccctgtttcaaaaaaaaacaaaaacaaagacaaaaaactcttacaactcaaaaagaaaaacaacccaaatcaaatacgggcaaagagcttgaatagacgtatcttcaaaacaggatatacaaatggccaataagcacatgaaaagatgctcaacttcattaatcatcagggaaaggtgaatcaaaaccacctacaaataccatttcacacccacagggatggctatcagtaaaaacagacaaaaaacaggagataacaaatgttgctgaggatgtagagaaattggaatgcttgtgtgttgctagtggcaatataaaatggtttggctgctgtgaaaacagtttggcactccctcaaagaaattaaacatagaattaccatatgacccagcaattccactctaaggtatacagtcatccctcagaactgtgagggattggttccaggacaccctctggataccaaagtctgcagaggctcaaatctctttatataaaatagcagcatttgcagataacctatgcacaccctcccatatacttgaaatcatctctagatcactcatcatgccgaatacaatgcctacacatcactgcattcacgtggattcaacggcccctggcagattcacgttttgccttttagaactctgtggattttttttccaaatgctttctgtttgtggttggttgaattcatggatacggagcccatggatatggagggccaactgtatacccaaaggaattgaaacctggtactcaaacacatacacgcacagccatgttcaaagccgtacttattcacaatagccaagaggtgggaacagcctgcatggccgtcaatggatgaatggataaagtgtgggacagccatacagcagaatgttacttggccgtgaaaaggaatgcagttcttatacatgcaacaacacggatgaactcacaaatacggcagaaagaaggaaagaagcgagacacaaacgtcacgtactatatgactccatttatatgaaactgccagaataggcccatccaccaagacacaatatagatgagtagctgccaggaacagtggcgatggggggaacgggaaacagctgcttactggcacaaggtttccttccggggtgatgaaactgctctggaactagaaggagacggcagtagtacaaccctgtgaatgtactaaatgccactttacttactgtttgctttaaaatcgttaatttcatctcgtgaatttcacctccattcttaaaaaggttggggggatgggggtgcggcggcacttattcactggttgtgccaggaggttttctgatatttggacatacaacggctagccccctctggaatgaatctggttcatccatttagtattcatttaataaatatttagcaagtgctacctccatgctagacgccagacgagaacaaaagcagagccctggtcctgagcttactttcgggtggtagagacacacagacaagtaaacacacatccacatatgtgctacaaaaaagaaaggaacagtgagttagaaaaaagaataaagaagaaccaaactcagatgacaggctttggttaattttagatgtcaacttgactgaattaagaaatacctagaggacctggcacagtggctcatgcctataatcccagcactttgggaggccaaggcgggaggatcgcttgagcccaggagttcgagaccagcctgagcaacatgacaaaaccccatctctacctcccaccaaaaaaaaaaaaagaaagaaagaatgaacgaatgaatagctgggcatggtgacatgcacctgtggtcccagccactcggaaagctgaagtgggaggatcacctgagcccaaggaggtcaaggctgcagtgagctgagattgtaccactgcactccagtctaggtgacagagcgagactccaccacaaagaaaaaagaaaaaaagaacctagagacccggtaaggcattatttctgggtgtgtctatgagggtgtttccagaggacactggcatgtaagtcgggccgaggagggaagactcgccctcagtgtggaccagcaccatccaactggttgggttgcagatgggacaaaaaacagagaaatggccatctgtctctaaagggacaaaaagtcagggagggcaatctctccatctgcctctctccctctgtggccttaggactctggcctcacaccctcagtaccaggctttcgacctcagactgacaattacagcagggtttctctgctgcggaggcgtctgagcttgaggggagctgtgctgccggcaacccagatctccagcttgcaggtggcctgtcacgggacttctcggcctccacaatcacgtgagcctattcccccaataagttccctctcgtatctgggtatctatctatctgtctctcctattgattttgtctggagaaaaaaccccaacaaatacaacaaccaatgggtcaaagaagaaatcactgggagaattagaagatacttttgagataatgaaaacaaaacacaatatatcgaaacatatggaatacagtgtacacagtgctcagagcgaaatgtacagctgtaaacacctacattcaaaaataagagtgacatcaaatcaatgactccttctacaccctaaggaattagaaaaagaactaaactcaaagctaacagaaggaaaagaacagaaataaaatacgcaataaaaggcatagagtgaatcaataaaatcaagttttttctttgaagagatcaactaaattgacaaacctttggctagtatttaaaaaaaagaacataaataacccacatcagaaataaaagtgggaactaccaatcttatagaaattaaaagaattatgagaatactatagacaactatatgccagctagataatgtaaataagacataaccttagaagcaaattactaaaattgaatcaagaagtagggctgggcatggtggctcacgactgtaatcccagcactttgggagaccgaagtgggcggatcatgaagtcaggagatcgagaccatcctggctaacatggtgaaaccctgtctctactaaaaatacaaaaaaaaattagccaggtatggtgggcacacccgtagtcccagctactcgggaggctgaagcaagagaatggcatgaacccgggaggcagagcttgcagtgagccaagattgcgccactgcactccagcctgggcgacagagcgagaccccatctcaaaaaaaaaaaaaaaaaaaaaaaaaaaaaagaagtggagaatctcaacacattgatatcaagagacggaatcagaaatcaaatacttcccacaaagaaaagtccaagaccagagagttcactgaactccatggaacattcaaagaacaaacaccactcctgctcaaactctaccaaaacttagaagaggagggaatacctcctaactcactttatgagggcggcattaccctgatactaaagccagacaaagataccacaagaaaaccacacagcaatgttccttatgaatacagacacaaaaatccttaacaaaatactagcaaacccaatccaacagcacactaaaaagattatataccataaccaagagggatttatcccaggaatgcaaggcggcagggggttcctacataaaaatccatcagcgtaatacagcacattaataaaaggaagaaaaaatctacatgattttctcattagagacagataagagcatgtgacaaaactcaacacctattcatgatttagaaaaacgtcattcagcaaactagaaaaagaaggtgtgacacggtaagaaatatatatatttggtctctgctcctagtcctggcaccgagctgctaaaacactttctgagagatggtggtgatagaagcctgttttgttttaatattgggtcttagtcctgggttcctgacacaaaggcctctaagatccttgaaatcttggaagtgatacgagcatcttttcgttcgttcatgaggtgtctgctgactgaatgcccctagatagcttcaggatgggggctggttgccaggggaaccaatcatgtgataggtggctggaattttcagccccaccccctgacctcttagggagggcaaaggggctggaaatttagtttaatcaccaatggccaatggtttaatcaatcatgcccacacaatggagtctccataaacaccttacacaaaggggttccgagagcttccaggctggcccgtctgagggcatggaacgtcagcacccttcccacatagcctgccccatgcagcaaggtttggccattactgaatcgcactctttacaacaaaccagtaatggaagtaaaatgttttcctgagttctgtgagccgttatagagaactgttgaacataaggaggggcaacacccgatttatggccggttgagtacaggtggcagtctgggactcgcgactggcatctgaagtgggggctgtcctgtgaaactgggctcttaacctgggagcttgcgctaactccaggtcgtggatgacatcactgaattcaactgcaggacccccaagtggtgtctgtggagaactggagaactgtaatgtctgggaaacccacacagttggtgtcagaaatgttgtgagtggagaacaggtttttccttcttctataagggaatttccttaacctgataaagggcatttacagaaagttcacagctgacatcacactcaatggaaaaaggctggaaactcttcccctgagatcaggaaccacgcgggatgcccaccctctccactgctattcaacactgtgctgcatgttctagccagggcagtaaagcaaggaaaagactttgacgaaagacatccaaactggaacctctatttgcagatgacatgattccatatacagaaaatcccaaagaagccacacacaaaaaaaaaaatcaacaaaagaaaaaaaaaaaacaacaccctactaaagctaataataaattcattaaagctgcagggtacaagatcaatacacaaaaattgtttgtgctgtccagagaggaggtctacaggaaaaacaaaaacaaaatcagctgtgcttctatacacctgcaatgaagaatccaaaaagggaattaggaaagaattccatttacaatagcattccaaagaataaaatacctaggaataaggccaggcacagtggctcatgcctgtaatcccagcactttgggaggccgaggtgggcggatcacttgatatcaggagtttgagaccagcctggccaacatggcaaaacctcatctctactaaaaatacaaaaattagctgggcgtggtggcacacgtccgtaattccagctactcgggaggctgaggcaggagaatcgcttgaatccaggaggcagaggttgcagtgagccaagatcgtgccactgcactccagcctaggtgatggacagactctgtctcaaaacaaaacaaggcaaaaaaacctaggaataaatttaagcacacaggtaaaagacttatgtatactgaaaactataaaatattgctgaaagaacctaaagacttaattaagtggaaagacattccttgttcatggactgaaaacttaatattgttaagatgtttcaaaaatgactagatacaatagaatccctatcaaaattccaatataattttttgcaaaaatggaaaagtcaaacctcaagttcatatggaatcacaaggggcacagaataaccaaactcatatggaagagggaaaaacaaaacacagagttagaggactcacacttgccaatttcaaaacttcctacaaggctgggcgcgctgactcacacctgtaattccagcattttcggggcccaaggcgaaaggatcgcttaaggccaggagttcaagaccagcctgggccaagcacggtggctcacacctgtaatcccagcactttgggaggccgaggcaggtagatcacctgaggtcagttcgagaccagcctggccaatgtggtgaaaccccatctctactaaaaatgcaaaaaattagccagacacggtggcaggcacctgtaatcccagctattcaggaggctgaggcaggagaatcgcttgaacctgggaggcagaggttgcgatgagccaggatcgtgccactgcactccagcctggacaagagcgaaactctgtctcaaaaagataaataaataaataaataaataaataaataaataaaaagaccagcctgggcaacacaatgggaccccatctctacaaaaataataaaattagctggatgtggtggtgcaggcccgtggttccagctacctgggaggctgaggtgggaggactgcctgagcccaagaggtcaaagctacagtgagccatgattgcaccactgcactccagcctgggtgatagagcaagactctgacaaaaaaagaaaaaaaaggcggggcacggtggctcacgcctgtaatctcagcactttgggaggccgaggtgggtggatcatgaggtcaggagatcgagaccatcctggctaacacggtgaaacctggtctctactacaaatacaaaaaattagccaggcgtggtggcgggcacctgtagtcccagctactcgggaggctgaggcaggagaatggtgtgaacccgggaggcggagcttgcagtgagccgagatggcgccactgcactctagcctgggcgacagagccagactccgtctcaaaataaaataaaataaaataaaaataaccttcctatacaactacagtcatcaaaacagtatggccagcataagcacagacacgtagaccaatgaaatagaattcagagtccagttttaaaccccaaatctatggccagctgattttcaacaacgctctaacaccactcgatggcgaaagaacagtctcttcagtgaacggtgctgggacacctggaaaaccacatgcaaaagaatactgttagacccccacttcacttcatatatgaaagttcactcgaaaatggatcaactctctacgtataaggactacaactatgaaactggtgtaaataaacatggggcaaatcttcatgacctcatttggcaatggagtcacagatttgacaccaaaggtgtgagcgacaagagaaaacagataaatagaatttcataaacatttaaaacattcatgcaacaagggacattatcagggctgggtgcggcagctcacgcctgtgatcccagctagttgggaggctggggtgggaggactgcttgagcctaggaagtcagggttacagtgaaccaagatcacactactgcactccagcctgggcaacagagtgagaccctgctcaaaaagcagacattatgaagaatgtaaaaaaaaaaaaaaacacctaaaaaaggggaaaagatatttgaaatcacatacccaaaatatttaaaaaacttctataacacaacaacaaaaacaaacaacctaattcaaaaatggacaacgggctgggcatggtggctcacgcctgtaatcccagcactttgggaggccaagacagatggatcacttgagattgggagtttgagaccagcctcgcaaacatggcgcaaccccatcagtactaaaaatacaaaaattagctgggcgtggcagcgggagtctataattccagctactcgggaggctgagggaggaaaatcacttgaacccaggaggcagaggttgtagtgagccgagatggcgccactgcactccagcctggccaaaagagtgagactccatctcggaaaaaaacaaacaaaaatgggcaatggatatatctagacatttctcgagaaagagatacgtgcagccagcaagcatgtgaaaagacgtgaaacatcacgggtcatcaaggaaatgcaaataaaaacctcaacagttaccgctctataccctagaggatggctataatttttaagaaacagaaaacaagcattgctgaggatctggagaaacaggaaccctcacacattgctggtggacctatgacaggatacagccactggaaaacggcttagcagttcctcagaaagctaaacagaaaattattgtatgagcctgcaattccattcctaggtgtatacacccagaggaactgaaaacgggcactcaaacaagtacaaacacacactcacacacgttcacagcagcactattccccatagcaaatgggtagaaacagcccaaacgtctatccacagatgaatggataaacagaaaatggtatagctgtccgtcattctgtgtagattccatacttttgaatttacctcctcactgaagttcatttgcaaccccaaactgatactgtcagctttcacagtcatttgcagacatgcccagaacagcagaaaggttgagctgcccaacacgcatgttcccagcagatgtcaagcaaggcaacgctgtcgtcttgcttcggaaaaacttcttcacaacacacatgtattactttgcaatcagatgaggccttccaaattctttttccttgagagaaaggagtgatttttctgtaaaaggacatcctaccaacaggtcaaacaaaatgcggcctcagttacgttctaatgcctaacactgcataaagcacaattccttcattatacaggcgatgccatattcaaggtcaagtgcactcgctgaaaaaccctcatgcttatacaagaatagagctgtcggagaaagcaccttttctgctccggtcttagagccacactcgccggcgaagccaaacaacatctttttcatcgcaggaccctcaacctcctttgggccctctgaggtctgaggctccctttctccactgaacttccttgcccagactgactggaaggagccgataccatctcaacaatgaaaggatgaaatgcctactatgtgccacgcgccgggccaagtgctacacctgctgtctccctcttaatcttcctgatgcctgagaagcagacgcagccagaaaccccatcttatggatagacaaactgaggcccagaggagtgtcccactcacggtgacacagccaggctctgagattgaacgctggcgtgtccacctccaaactgcggtctccgcagctctctccctacccagtctggacacaccagcgcctccccaaacccaccccgtcaccaacctctgtttactccttattccacttacctgacctcccaccgaggagtaagccatggctaaccaccaaacgcgagccctggctacaccaggtagaaaaaccaccagcaaacccatgcactatgaccctgtccctaatcgtgttccaaatcctgcagccatgacacactcctatccctggcaccaaaactcatcaagcactgtcattctaggtcatgcctgtctcaggtatttggacaactggtgtgtgtttacaaagagctggttccaatcctagctctgccaacttctgaggcttgaccaagtgactcgggatccaggatctcctccacctgtggacagcacacacaccactgccgctgtgaggaggacctgcatccctggaccttgccgtggggccactggtactcccggtgtaggaccctctacaaccaccccaggaagagagggttcccaggcaatcgggcacatggtacactgaagcggctggcctctgtcctgagagagagggagcgctgcgattctcagcacaggctcatggcagaactccgggcccagctacgcggcttctgcaggaattattcagacaaataaacaccaagaaacatgacttaaaaaaaaaaaaaaaaaaaaacagaaaaactggccatcctccaaaagggctcaatgaaagcacatgctgagatttgaaaaacctgctacatctaaaatgggagaattttactatatgtaaattatacctcgacaaactagacttaaagaaaacatcttaacccaactatgttaccatgggttgctggaagtgcacatgctcctgctgaagggcaccgagggagctggcaccacgcttggggccttccagaggaaccaggcaacaggagctctagaggaacatggggtcccatgccccccatgcaactacatgcccccacaccctaaatgaagcccccaggatcccaaaagagcaggcagggattcagagagggctctctgccctctcgacacccccacacaggggaggatgctgggcccagtagtgacaatcctatggtcaaagggcccccggctccctttatctacagggccaggatgcaagggtggagcttcaggaagtcaggacagaaacagccctggagtctgcatttcagactcagttgagtgctgcaggacacagcaggtaggggcacctgagtggcagccacttagggcccctgctgcactgggtacagtggcaccacacagtatgggtttctgccacacttgggagcggctggcctgcatctcgcctgaagttgcccctactaagcaaggatgacaagcagcaaacagcactggccaggccctgccccacctgcctccgaatccacgggcagcccacggcggagccaggcagcagccggagccccttgcctgagggcactaggaagtagaatggatgccaccagtccccaggtggctgaaggccgtgtcagggaccagacaggtgtctgggaacacagaaaacctcactgagcttgggcacagtggcaagtgcctgtagtcccagctacttgggaggctgaggtgggaggatcgcttgagcctggtaggttgaggatacagtgagctatgattgcaccactgcgctccagcctgggcaaaagagcaagaccttgtctctaaaaacaaaacaaaaaatgccttgctggcccaaactgcttctgaacctcagaggaccttaatctaagtcaccccagaggcgagtttaaactgcccatacagatggtggtcccacagcccacccgctagaataccagtgcctgggctgtggagcacctttgcagatgggctcgagcaatcccctcaaccgccccaagagggggctgctgttctcattccccttccatacgctcaccggatacagctggggagactgggagcccgggcacacacctggcagaggggtggccccataggcccaaaggcagggaccactcacccctcaggaggcccacttgcaggcaggttcggctcttctcccagcggggcctcaattccaacaaagcctcagaatgacctaggtttctgtgaactggaccccgcgcgaggccttgcatctgaaatcggccaagctgcaccggctgaaacgtcacccggctcctaggacggccgcacgccaaatgcctctcctcaaggcccttcgtgccagagggtttgtggaaaagtggaatggcagccacgcagcccggcaccgccaggtacaaaccggggactcagtaaccaagcggggcggcatccacaggcctcccagggacacctccttccccagcgttgcctccatgccgggccagctgcacttgtgggaaagcagccggccatggacaagccacaagccaggaaatgtcaccgctggccctgtggtgacacctgggaggaggagcaggggcaggctctgagttgttttaatcattaggccaaaaaaaaaaaaaaaaagtgaaaaactacagatgaaagaaaagaaaagaaaaccccctggactcccaccacccagatgacccgcgccaacattctggatagagataactcctttttccttcaagtattatatatgtagcttgcttcgttaattctgaaggtcatcaaagattctgcccagaagacgcatcgtaatcggactgtaatcagatatttatgctatttcctgatctcagtcactacacacggcccggttattaaccctctaggaccgtcgaggaagctggccctgacaggggatgtcactgctggcacattttctaggcaactggacaggaggtggcccagcagctcccctagagaagcagaccaagggacacgcccacctgctgtcatgaaaccagccgtgtcctggcccccgacgtccccaggaatggagatggtgaccagcaccccccgcagcactcactggaatgtctgtgcatgggcagcggccagttctctggcctgttttgtgaactgccgtggcacccggagcaggggtccccacagagaggcatcctgcttgctcccctcagggatcctaccttgtttttgaagtgcacctcgatgggcatgatgaagccagcgtaccccgactcctctactttgtaggggggctccttgcacactaaaaagaaaaggaagaaacacacccatcagcctcctgcctgtttcaggcccagctgccagcggcagtaccgcacccctcaaccccaccacctcctcacaggggcttggctggcctctcgggggtggcttttcaggaggttaagcccccgacaggattgacttccacggcaaagttatcttaggaataaaacagcagggaagaagaggagaaaggagacttggccaccggcatggtcagcagagagtgagaaggaacgttagcctgtcatcgggatacttgctcctgcagaggatgaggaggctgaggccagagaaggctgcacaagtttgcccgactcaggtggatgtcggtaagcgtgacctgggtgaggtgtgaaacccagcagggagggccacacactctactgtcaccacctccagcacgggggctgagcacctgctgcaccacggacacatgcactgggagacaggggagccccaggtggctgggaccctcctcctgggttctagtttagcacctaataagagcattcccaagtgacgcaaacaaaaccccattgaccccagagattaaaaaagaaaaaaaaaaggccggacacggtggctcacacctgtaatcccagcactttgggaggccaaggcaggcggatcacttcaagtcaggagttcgagaccagcctggccaacatgatgaaactccgtctctaataaaaacacaaaaattagctgggcgtggtggcacacacctgtaatcccagctactcaggaagctgaagcaggagaatcgcttgaaccccagaggcagaggttgcagtaagcggagattgtgccactgcactccagcctgggtaacagagcgagactccatttaaaaaattaataaataaacaaagtgcagcatgaggccaggcacctgaatacttaatctgaacctggggaggaaagcggaggcagaacagaggaagggtggcctgtccccagcagaggaggcacgggcatgggcagtggcctgggatttgctctcagactccacccatgcctcgtcttctccccactcgcccatagtctgaatcccacccagccacaaaggcccacagcagggccacctccttcgagaaacagaccccatgtccctctgcctctgacctccaggtcacgtgcttcccaaatcgactgtcacatcttatctcatggtccccacgccttcaagaaggaatcctgtcctgtgacgggtactccaagcctgaagaacttctatccccccagacagcgccaagagggatggcagttggccgagtgcttcaattcaaccaggggagaacagggagacgcaccggcccactctcctgcctgagagcccacaggaagcaagaggacaggaataaggccgtgagagtgaaggcaggagggaggagattcaagccacctgccagtttctgaaaggcagaagtcggacgaggacacgatgggcaaggggcaggacaaggaggcgacggctcagagtctgccatgggggcgccgcagggcagggacagccactggtgccagaaggctgaaggtcctggactggctgagcggagggcaggagtgaggatgaaagctgggggagggaaagggagcacggtgggggaggagggtgggagcaggggagcgactgccactgcggggcctgagcttctccctggggtgacagcaatgttctggaattagacagcagtgatggaatcagtggtcatggccgcacaactatgtgaatatactgaaaacgctaactgtacacattacaagagtgaattttatgatgtgtaaattacatctccataaagcggttattaaaaaaaaacaaaagggcaaactgaaaggctgtgttgggcacaggagccctgggatccctccctcctgcccatcctccttcccgcccattccccctccacccctccccaccccaggaagtttcaggtttccctctggagaaattgagatggttctgtgtctcaaggagccaactatcagggggaagctgaaacttgcagcgtggaaaccagaccccgaggaaggccttactcattaggaaatcaggaggcccgtgagccttcaggcctgtggataggcagaacccaccctcccatcacataacgctcaggagctcccaccaggaggaaagagcccgagcaaacaaataatttggagaccacagagagtttgacaaaaagaaagaaaaaaaataaaaaccaagagtcaatgtcctcagattcaaggagatatatatccaacaaataaaaataagatacttctaaaaggggaaattacagccaggcaccacagctcacacctgtaatcctaggcactctgggaggccgaggtgggaggatcacttgacaccaggagttcaaggccaacctggatgacattctctactaaaaatacaaaaaattagccaggcgtggtggtgcgcacctgtaatcccagctacttgggaggctgaggcacgagaatcacttgcacccaggcggtggaggttgcagtgagccaagatagtgccactgccctccagcctaggtgactgagcgaaactctgttaaaaaaaaaaaaaaaaaaaaatgaggatcccagaaagaaaaaaagagaggaaataaacagatggaaggaaactgtcaaataaatagaaggaaactttcagagctaaaatgaaagacactcaaatgtcacaaaacatagtgaacagcaaaaaaaaaacaaaaaaacaaaaaaacaaaaaaaaacatgatgtcataaagcaagcgtcctaaaaacataaaaacatcctaaatgtttccacagaaaaaaacaggtcacatataatgggatgaggaccgaatggcatcagactttccagaagatactaacacaacgccttcatagcactaagtgatatatactcccaaaatgtttgggagcaggagtgttgtgaatttgggatttttcagactttggaatattcgcattcctctggttcagcatcccaaaaatccaaaatctaaaatgctccagtgagcattttctgagcatcatgtcagcactcaaaaagttttggatcggctgggtgcagtggctcccgcctgtaatcccagtactttgggaggctgaggaaggcgaatcacctgaagtcaggagttcaagaccagcctgaccaacatggagaaaccccatctctaataaaaatacaaaattagcaaggtgaggtggtgcacgcctgtaatcccagctactcgggaggctgaggcaggggaatagcttgaacctgggaggcggaggttgcagtgagccaagatcgcgccattgcactccagcctgggcaacaagagtgaaactctgtttcaacaacaacaacaaaagttttggatcttggccaggtgcaatggctcatgcctgtaatctcagcactttgggaggctgcagcaggcggatcacgaggttaacagattgaggccatcctgaccaacatggtgaaaccctgtctctactaaaaatacaaaaattagccaagggtggtggtgggggcttgtagtcctagctactcaggaggctgaggcaggagaatcgcttgaacccgggaggcggaggttgcagtgagccgagaacgcgccactgcactccagcctgggcgacagagtgagactctgtttcaaaaaaagttttggatcttaagccgggcatggtggctcacgccggtaatcccagcattttgggaggccaaggcgggaagattttaagcccaagagttcaagaccaacttgggcaacatggtgaaatcccgtctctgcaaaaaataaaaaagttagctgggtatggtggcgggccagtagtctcagctacttgggaggctgaggcaggaggactgcttcagcccaaaggtcaaggctgcagtaagctgtgatcacaacactgcactccagtctgggtggcagaatgagattctgtctccaaaaaaaaaaaaaaaaaaaaagttttggatttcggattttcagcttagggattcttgacctgtaattcccaaaccacaaaactacacccaaccaaccattctactgtgagaagagaataatggcattttcaaacatgctaggactcaaagggtttactgcccacgtcttataaattttttttgtttgtttgtttttttgagacagagtttctctctgtcacccaggctggagtgcagtggtacgacctcagctcactgcaacctctgcctcccaggttcaagcgattttcctgcctcggcctcccgagtagctgggattacaggcatcctcactgcccctggctaactttttgtaattttagtagagatggggtttcaccatgttggccagactggtcttgaactcctgatctcaggtgatccgcctgcctcagcctcccaaagttctgggattacaggcatgagccactgcgcccagccagaaatgtctgaagtaatctcttggaatattacttgagacactgctctaccaaaacaagaaaataaaccaaaacacaggccgataaacaaacctcaggagaacaggagagaaaaggcccagggtagtggctaaaggggtggctggataagagtccgttgtgattagagaaggaaggcacagagaaccagcatgaaacactcagaggactttacaaacaagccagaaagccaggtaaggcggctgacacctgtaaactcagctactcctgaagcagaggcgggaggactgcttgagcccaaggagttggagttcagtctgggcaacacagcgacacccccatctctaaaagaatttttttttttgagacatagtttcgctctgtcgcccaggccggagtgcactggcatgatctcggctcactgcaacctctgcatcctgggttcaagcgattctcctgcctcagcttcccgagtagctgggactaaaggcatgcgccaccacagccggctaatttttttgtatttttagtagagaccgagtttcagcatattggccaggctggtcttgaattcttgacctcaggtgatccacccgtctcggcctcccaaagtgctggcatgaaccaccgcacccggccaaaaaattaaaaaaaaaaaaaaattccacagaataaatgaaatgactgagagaatggggggaaaatgaaggtatgctaaagacacaatgcaaaaaggagaagtaagggggtattccaaaagccacagaccaaatgtgaagcaagctaaaatagggccaaattttaaccaaaaatgaccaaaaagaacccgtttcacacagacctgactttgagccttctctctggagtggcccagagttcaggacatgggaaacagaagctgaatgaagtcctgccgtcccaaccagcctgatggtgacagcgtcaaacatgtcaacgccgcctactgctagttcccaactcttacagtcaatctataatcggggagcgaaggtcttggtcttcgtcaataagcttaacaacgtccattgtagcctcaaaaagaggggtgcagcagggtcaaaaagagacagggtactggtggccttgccctcctcagtggagagtcagaaaacactaacaaaagctgaccaggtgcaagggtccatccagtcatcaaacacttagtaagcacctactgtatccctgcaggcaccgaacatgtagcagcaaacaaaactgacagaaacctctgacttggggtggggagagggatggacaagatgaagaagtcatatgtacgagatgttaagatggtgctaaggagaaaaccaaagcagaaaacaaaaaggctaagaagcatatggctgtgtgggtgtattgggcaacgaaaccgcgattgagcccaggcagccagaggactccctaaaaagggtgacgtgggactcttctgtgaaggatcccaaaggtaaacaggctcacatcatcattcaaagtcacaaagacaaccaacgcaaaagcgagtcactggactattaaaaacttagagaagacagtggataaaaggggtactttgggataaattctaacccttcaagctggtaaatcagtaagtattgtctacatttaaaaaatcaagaaataagaagcaaatgagctggtattaagaggagtccagagagggctaggaagacagccccggggagggaggactaaggaggccaggaacagcaactttgtaccttacatgtttctaccctatttgatttgtgataatgtaagctggggcggaagtaaaagatactttttaagtacctcaagtatcaatccagaggctggagtgctctaagaggttcactccctctctaaagttttattcaatgccacagagtgtgagctggaaatttactttctgatacatttgatggggccgctatctgcctccaggccccacagacagacagcaacaaacagggctcagctactaatttaaaggccgcctgcaaactgacactgaagcctggcatggtggcacatgcctgccaggagctcaagacaagcctgggcaacacgacaaacaaaaaacaaaacaaaacaaaaaactaaaaactaacccttaagagtgagccccactcactaccccaccttccaggtacttggagaaggtgccatgtcaacgtggtggggaacaaaggtgaaatcaacagcctcaaagtggatggaaatcagcgtccggggcccatccctgtgctccagggacagagaaaaggggaggggtgagggggttggtgaagaagtggagtggatgccaccagagaaaggaaagagggcctggtgcaggaggggcagccaggctcctgctctgccaacgtggcacaaaagcagccacaggcaacacctatgcgggcgggcatggccgtgcaccaataaaaacaggctgcactggcagtggccagacccagcccacaggccagcctgcccaccctgctctaagcacaggtagcggcctgccccctggacccgtctccccgtctgcagaagagggctgtggcgagaagaaaacgcgatcctgcgcacgaagcgctggccaggaagtgctcgatagatggcatgtgtccccacgattaggaagcggtttataaacatctgccgctgtcaggagcctccgcggccatcctctaagaggcttagagagggaggaaggaaaaggggaaaaggtgaagactcaggaaaggagaaatgcagagggaaagagaagccgcaggctgagggaatcgcaggtgggcatcccttcagaatgacaagcctctactgctgtcaacgcccatcacttccccactaggctgcaaaccacttacaggctcagggccagggtcctgggtcccgggtcccgggaagctcttgcttcaacctaagcacacccacgcttgtgcacggctcacctcccgtggcccctggagctcccgggacccccgtattgcagggtagaggggtcaccagcccagccagggctcttcccaccctgaagtgcttcctacagaaagtccctcattcctttatcaagacatcacccaagaagcatttatcgaacccctgtgatgtgccgggctccgggcttcacactggcgactcagcggtaagaaaagtagacgcggccccagccctgatggcgctcaccagaccaccacctcactctccgattccccaccacagcctttccctagggctcacttccccaggagggcatccctgatcataaactgggtgacttcctgcctgtgccccgtcacactgcaccctccaggaaggccagggcccccacgccacaggtggagacgctgacagaatacacgactgaggcactcgtgctgaatcaatgacggcctgaggcttgaagggagagggaagacacggaaaagacagtggtgacatgagctccggcattctttctgccccaaatattgggaattcttcacatggcacacaaacaaacataggcccggtcggcaacttcctgatcactcaccagccggctgacttcacctgtcccacccatgccaacctggctgtgctccctggctgcttcccagagcccgggtctaaatcacgacacaacagaccgccaccacctccttcggttcttcctacgactaactcaacagctggaggtgacacggctccagtgcccccacgccgagggacgcaagctggaacctcatggttggaggggtcctgctgctcctgagggaggggtggagcctggccttgggaggagtgaagacagatgggtccgtgctgtgggcactcagggcttgaggccactcaccgcgtctgggcttggggaagctgtcgtgcagccagaagaccaccttctccacgaagtgctggatgtcacattgctcggggccgcggacaaacaccatccagtcgtgagtgaacccctccgtggtgggcttcttgcgcagttgggcgcgatgccccagctctaacctcacctggacggtgcactggaggagagagaggtggggagatgaagtcagcacacgcctccaagcaggggactgtccccttacccacagagaactttcgataaagacccccagcagtgcaatacgctctcaacccagtgagcagcacacagacggcttcctatcgcgccagcaccttgccgcagacgtcccgtgccttctcccctccgtactcccacacagaccccgtgtctcctctcatccaccgcctcatcctcaattccacccgcacagcctcctcaccggtccccagctcagcccagctcactcctgcctcggggccaccacactggcctaggatcctctgctcctgagacttcccacactggcgcctcttgtcactgggctctcagcttgactgtccctctgcagggaagcctcccctgaccaccgatccaaaagcatccaccaccgctcccatcactctatcatagaggatgctcttccgagcactttcactatcaaaagtcatcttgctgatggctgtcggtgtctctgccacctaagcttgttgactccagcattttcattcccaagcacgcatcacagcgcctcccggaggcccctctcctttccctaagtcatcagctacaacactggctttcagtttcaaaagcagaatgggaggttcccaagaagaaggcagaggccagcctgcggccccctggtgaccggtcccaggtggacccgtggcctgggcagcccagctccctccgctgagcacatgtcgtgtctgacactttgctctgaaatacaaggcagctcaggccagttccatgccactgaacacaaagttgcatgccttcaaagcactcttcatacctaggttggccaaaaccaccaacagggaacctacagtaaatatccaccctgctttgtaaaaacctccccagacttttcacagatacggccctgacacccgctatcaaatacaagaatgttacaaaataaagcagcagccaagcgcacacttgcttctaagtgctgagatagccgggagccagccagaccatggcctgagtcccacaccctcccctgacagagccgccctcccgggccccagaccagacagctcccatctgcgcctttccacgccatcgctcggcaactggccaggtgtgtcccagtggctgcaatccctccagtacctgtctcttctttggcatttcgaggccccgttcagaccccgccacctggctgagtgccccggcgcctggccggcttccctccctctccgtccccctctgagctctcagttgtcacgcgatggagccgctggggcaggcagatcctatcgcccccacccccgcccgccatgttaaagctttccacggcttgtcactccctcagaaggaagcccgagccccgcgcacgtcttccacgcgtgtatttcctcaagtctgagacgctcgtctcttttcatgtcctaacccttttgaagtcagagtccagcctgcacacaggcgcacacgtgcacacacagacacagaagctgctcctgagttggtggcgctgtcctggtatctcagagtcccagaactgaggaaatgcaggaaacgcgcacattccagctcaatcctacagccagccccagacacaccaggaacagccaccctatctctcttcatctcttctagtgccgcagcctgggtgccctaagctcgtttcaaaaccctactcatctcaagtcctggctcacacgctgccctgtccagggccctttctggtagccacgctggagaccaaccttgagtccccacagaagcctgtggacagctccacgggagccccttcatcccatcccccgctcctgggttgctgacgcagcccccagggcccctgtgaactctctgagagcagggactacatcttgttcgtcctcttagcctctatcttgaaaccacgggacaggaggcctggacgatgctggattaattaaaccagagagcctctcaggtcagggagttctaaatgctgcttttggagacggcagggccatggtggcagataaggacaggccagttccagcatgtggaagaactggccagagaggctgagggtctgtgcgcacagcaagccaggtataagaaatgaggcggaggcgtgcaatttctatttggcaacttaaaaagtaaactgaaacatgtacatgatacagatgtacaatttttatttgtcaactaaaaattaatttttaaaaggaaagggggcagaggggattcccttggctcaggacgactgtccctctggagttccctgggaaaagagggcagggactccctagggaccaggcacactgcagggggtgcctgggatcaggccggagacaaaagaaataacccgtcgtcataagtggctgacagatatgggaaacggtctcggagtcaaaagcccccggccctctgtgtaaggcctggggtgcaggcagaaaagggcgaatggcaaactaacagcaaccccagcccatgaggaggcaaccagaaggagtggctggaaaaaggggtgaacacagcccaaagccacagaactgacaggacccgagggtggaggacattcaggtaaccccaagatccgggcagcagggacattcacgaccccagtgtgggaagaaagtggggatggacggaagatcaggcgcactcataaacccccggcgctgcggattcatgaggatctcaggtaaaagtacccccaccaaacacacgaggtgagggctgagcaccggcatggcaatactcaggccaagcacgagtgtctgcctgaacaccaccgcattccaacaaacccaaaacaacactgacattagccccgagcggccatgaccaccctctatgcttacacgcctgcgcctctgcctttttcgctagaaaacaggaaggcaacccctgtcccgctgggagcattacaggtgaaaactaaatgtacatatacatcatgggaacagcaccaggatgcgggagaacgacccctgcttctgtggagctgactcccacacaatgacagtgtctcctcggaatcgcttattcactgacccggccactcagacctcggccgacttcccggcatttctgatgacagggagttcctacccagggcacgcaggcggcagagcagttattgtgaaagagtgaaagaccgcggttccactggagagggggaggatggaagcaccagaactccaccgcagtggccaaagtaaacaggaaggttccgaggcagcgatgggtaatctttgcagccggcaggccgggcccaaagtgctgcccaggcgacactgatgccctgggggctggcgccaacttgagcctcaacacccactgttaaggacacaccccagacttggccaacagatgcgaagttcgggtgcccggcctgctgcacccaggggactgtggagcgctgaggggggcactccccggaagggtggaataacagagtctctgctgttgtagtaaaaaaggaatcacagattcagtaagacgctcaagccacgtcaacgggaggcaagaagtggagccccggccaacgcgtttgacttgtcaggtcatgataatttattagcacagctaagccaattccatagccaagggtaaccaccccccttcccccacaccacctggactctttccttggccattaggaccaaagaattgaagctaatcaattagctgtctctctaggaagggtgcctggctgcagaggttaagtgacaggctctccagaatgtcttagagtgaataatctgattggtcagtggctctcccccaactttatcccagcaagttccttcaaggcaccaggaatgcctgctgctgggaggccacttttttggaacctctggaatagacggctggaaatgagccggggggctgtggtctcagggatttccacttccctgcacctctgggaccaccctgacacccactccccaacaaaagcccaggataaaggggaaccttccaggactgtcccggaaagagctgtccgtctcacttctgggaaaccatctgaaagacagcggacggagggatgggcacgagcgctccaagggccatctggggacagttaggcttgggcagagggcctcagctgggacactgccctctctccaggccagctggcagagggcacttggaaccaaagggccaaaatcccaaatcaggcaaaccaggcagcctctcgagggcagcttccccggggctttctcaacgcagcgtgcggttctccccaggtgtgggctacagcggccgccgcctggcaaagagccgcgagccagccttgttccaacagcttcacacaattccttcagccaatgtaccccacttcctgcaagccctgaaggcaggtcttcaacaaccagttcatctgaagatttcccctggtcttctggtgggaattctcaatagatgcccttcctctgggaacttggacttcgcccagtggtggaattacacctggagttcggctactgcatctaattccctcggaggcaacgatcccctcccatcccaggagaggagaacactgaggagtcgtttcccccttcagcctaaattgattttgaggtcctcctgggctgaacacgtgcacgtgtgtgagccacacatgcacaaacaggaagaggtgacgaggcttgggcgatcccatggagcgacggcaacatgagacccaataaaaccccctgcggaatcttctcccgccaagcccagtcggggccctcagtggtaaccactgaattagaatgtaagagatggggaaagacaggtgcccctctgtgacagtcctctgaagcggagagctgcccacccagaaggcaggggcctctcactaacaggtacaccgggtcctggtcccctgactgctggcacactggggctaggggccagcacctccacccctcttctggctccatctgtcctcgtccctctgacccaaggcacaatgacaaagcgatgagaaggcactcaatgaatttctctctggaaactctctaagagtggtgtgtagaccacctggaaatgcaagttcccctttatagggtctgcagattcctggtaagactgactctctgaccacattgtcaggggaggcctgggacagagtatttacgaaccaggggcccacagacgtgtagacagtgtaccggctatctcccacgttctccaggggggagggggaggagccttggtggactttttgaatgtgcacaaccccaatacaggcatctgtcaccagaccaggtgggcctggctgcaaagggactgattcctagttacttgtatttaaccagcagctggcaaagctgagtgcaaaacctcccattacgaaccacaacgggcataaagggaaatgggactctggtccctgccctcaactgcttcacaatataatcactttaggacaaaaaaactggcaggtcagctttccagggagtagcttcagagctgggagcaggtgaggaatctgtcacacctcagccagcaacctgggtaattcggagcttttcgggcaggtttggggagcagccgagttgcaggaggaagagtctacccacccttgcctgctggtaggacttctgagcctgcatttccacatctgtgaaatgggcccctggcatcagaaacaaactttccccgctgaagaacatcgttgtgaggcagctgctctcaaacccaaacctaggagagcatctgcaggaccagcaagcagcaattcgagcgtgggggtgctccctggtccttttgaagaacgtgaccgcccagatgctgacaccacctcccagctccctaggcagccccagtccccgtgacctgctctcaggccctttcccaatctcttttcggcatctgctcagccttatccttgtcacgtcccagtcccctccccccggccccagcccaggaaacaaaccacactccttccagacataacccttaagtgagcagggaactcgctcatccccctgccaaaaaaaatacaaataccacagacaacaccagcacagacttggggcggagggggaatcaaacatgcgggttacggttggggcaaagagaaccagaaaggcattttcctggccataaggaaaagatgtcaatgctgagaagctgggagcccagagcacagtgggaaatcctgcttcttaggggggtctgaaagtcctagagagtaaaagaggaaggcaaaaagagaatcaaagcctcccaaagccagcgactgggcggaaagctgtgctgtttcccactataatgaggcactaacattttgtggcatctggggggctagtgggagcggaagcccgggttctgctcgattcaaagcattttccctgtgccaagagtcccgcagggacactgaccaccaactcacctacttgagtaaaagataccattctctcctgtttccccaggggcctccggctctgtgaggaagggacagaacccttgggcctctctcaaatttgcatgaaagctttgctggggaagctagaatcagactttgggtccaaacacacttccctccaggagcagcttcccttgcaaacacttctgcaaggagggagaccatcaccatcgacggaactttctgcgatgatggaaatgcatctgcattgcccgacagggtggtcagtagctcagtagctcagtaatggtggttactgagtgcttaaaatgtggctggtgcgatggaggaactgaagttgtcattcgagttagtttaaatgtaaatcagccacagatgctggtgactgtggtaccgggcagtgcaaagccagctctctcccacacctgtccacctgagtgagacctttatctccctctgtcgcagaccaggaatgccacccatttccaccatcccacttacataagtgacagccacccagacctccagggttccacacatcacaaggggaacagacacgcttcggcctaggacatctcccccagggactaaggaaggaggaaaggggccataccctatgcctctgtgtgcccagcgggacttgcctggaggtgggcttcattgaaagtggacactaaaggtatatttcatttgggtttttaactcaatacagattggaagcaacaagctctgtcccttcaacggaaatcaactcacaccacgccgtggaaatccaccaatcaactgctgcaaactcttccttacctcttaagaagaaggcagcaacacccaaaccagatgggaagccatgggaactgggtgccagaagcatgagacacctgtctccatgaccctgtgccacaggcgccgagatgggcaggagggaggattcttgccccccacccatgaaaccacacagacagtgccacttcagtggcgccagcagccagggacgccccaacctgccctctctaacggcggagattttggctgccacccccacagccccacaacacctttcctggcctggtgcccctgaaagccagggcagcagaggaggaggaagaaatgatcccatgttgggggccagcaatgcttctgggcttgaggaagaggggtaggggcttgggtattggagaagaggcagcgcagagttgggtaaagggggtgccagggtgcaggaaggcctcgtgtttatgagaaccaacacagaccaatggggaggggccgtccagagcgtttagggaggttggggaacccacccacccaccctgggtttcaactgaggctctaagatcctgggggaaaaaaacagaaaatgaggtggaaggagggagagggtagtggctgaaagagacatcaggactcatcaggctgatgggcgttagatgaagtgggagatcctgaaggcaaaggttgtacaggagactgcaggactgtgacgtgaccaaccagcctgggagggagatctggactggggtcaagtgtggggaagcctaaatcaggatcccaggggcggagagggcccaagctgaggggaacagcaggccatcagtgactcaaaggtctggggaatccaggtcagagaagaaactgctcctggtcctggtctcagagcagagggtctgaaggtgaaagagacagccccgccgggtccgagggagagtgaccagggcctgaaactagaagggggctgaggcggcagggtgggtcaaagaaagaagtctgaaaaagcaagtacaaagagaggggacactccaaacaggcctgagtccctgcagcagaagaccgaaggccagggtcctagggagtcagaggagctcaggccagggctggggttgggagagaaagggatgccctggctgcagccggggcaggatcagacgggagagaaggctcaggtccaggtaggggatgggtggagataaagcttaggctgggccggggttcaaggaagagagacgccgcagagcagggtcccagggggccggggacgcctcatatctgagctgaggttgaagggaagacagacagcaggttggggactctgggagtttgaggcgactcggggacaagggtccagacaggaaaggagacagtgactggccctggacctagagacggaaaggtctactgggcagatccgaggggccccgggaggggtctgaacagggcccagatcccaggaagtgcctggaaggagctctgggccaggctgaagtcccgagagctgtcttgaggtccctaagccgggctggggtccccaggggcgtcccaggtggatgcaggtcggactggcgttccgaggggtctcccgggggtctccgagccaggctggggggtcaccaggggcgtcccaaggggctccgggcccggcccgggtcccgaagggtgtccgaggcgccctggccggggtcgcggatgggggaggggcgcccccgccccacataaaggcccgaggagcggcgggcgcgcacaaagcgggcgggcgggcgcggagcggggaggccgggaccggggagggccgggcgggccggcgggcgggagggggccgggcgggctgcgcaggggcggcgcggccgctcctcacctgattgtccatggctggcgccccgccccgcccccgggccccgcgtcgctcgccgccgccgccgccgccgccgccgctcaacgccgccccgccgccctcattgtctgtcaagcgccgccgccgccgccgccgccgccgatcccggccgcccgctcgcccgccagccccgcggaaccggaaaccaccgccagcccgggtcgcgcaccgatcacgggcccccgccgccgactagggcccgccgcatcgactgacagccacctgggccaatcgacggcgcggacggccgcttgtggcgcgggacttcctgcctggcgggggcctgccgggctgcggccggagggacgaagcccgcagccaatgggaggccgggaccggaggggcgggaggagggagggagggaggcgcgaggcgagcctggcggaggggagcgcgaggtgtgcgccgcacgtggaggggggcgggggcgggacgggcgcgcggcgcctgcgcgctgcggcccgcagggggcgctgcctcgtggctggagcctccagggcgggagcgtcccgggggctggaactgaggttacgggttcgagccctgtggagggatcccccagcccccccggtagggacacttttgtttcctgacctcatgatgctgctatgtaatggaacgagccctgggctctggaactggagattaattttcttttcttttttttttttatgagacacgtctcgctctgtggcctaggctagagtgtactagcacgatctcagctcactgcaacctccacctcccaggttcaagagattctactgcctcagcctcccgagtagctgggattacaggagctcgccattatgcccagctaatttttgtatttttagtagagacggggttttgccatgttggccaggctggtctcgaactcctgacctcaagtgatccgcctgcctcaacctcccaaagtggagattaattttctaatcttgcataatccttggcaaacctggtcagccccttcttcacctttccctgagtctcagtttgtgcatctgtgaaataggttgaagaacagtactgtgtgattcttcatgctaatttgaatgatacaaatttgaaatcgtgctacattcaaatgacccaagagagtcacatgttttcagttagacacgaagaataagttctggcgatccatcacacagcaaggtgactacataataatgtaattttatattttaaaattgctaaaagcggccagatgcggtggctcacgcctgtaatcccaacactttgggaggctgaggggggcggatcacctgaggtcagaagttcaagaccagcctggccaacatggtgaaatcccatctctactaaaaaaatacaaaaattagccgggcgtggtggtgtgtgcctgtaattctagctactcaggaggctgaggcaggagaatcgcctgaaccagggaggcagaggttgcagtgagatgagatcatgccactgcactccagcctgagtgacagagcaagactctgtctcaaaaaagagaaaaaaaagaaaaaaaatgctaaaagtggattttgaatgttctcaccataaataattgataagtatatgtggtgatggatatgtcaattagcctgatttgtttattccataatgtatacatgtaccaaagcatcaaggtgtac

SEQ ID NO: 377 - DNA, 19602 bp, Homo sapiens
  source 1..19602: mol_type = genomic DNA
tgaaggaatgagtgttccttttttccttttattttaacagttgacactgttaaaatagttcacatgagggctgggtgcggtggctcacgcctataatcccaacactttgggaggccaaggcaggcggataacttgaggtcaggagttcgagaccagcctggccaacatggtgaaatcccgtctctactaaaaatacaaaaattagctgggcgtggtggcaggtgcctgtaatcccagctactcgggaggctgaggcaggagaatcgcttgaatctgggaggcggatgctgcagtgagccgagatcatgccccactgcactccagcctgggcaacagagtgagactctgtctaaataaataaataaataaacaaataaataaatatagctcacacggacgggcagagggctgttcccccagaaggttctggatgggtctggtcttcctcagaactctgaggcatcacgggcaaggcaccaggagagagcgggattttcactttgccgtctttcactccagggttcccctctgcaggccccgagtcagggcctggacgaatctgagttgccgcagctccctaggggcagctggagcagctgttctgcccccagacctgcagggacccccatcttcacgcggagacaggcgggtgctgcagcctccaggacccgctagcttcctagctgagtgcttgggaagcacctggagcagcagaaacagccactggggctgaggagtcaggagagaggcagcggcggatgagctctgtctgcccaagcagattccacggccaaagcagggggtccgggtatggcgggagctgggccctggcggctgcaggctgtgcacgtggtcaggactcaaggaggtccgggagtcgggccaggacacgggggagcgcctgggagctgctcccttccttccctgcttccctcaaatcgatgtcctctggttcctacggccttgggggctttgagggaagcgactctgcacacggatggcaggagctctgtgccctcaagcctgccaccccggagagcttcccagggcctggagcccaaagtgccattgaagtcgcagtgggaacaccttgccaagctgaggcgctccgtgcctaatgggataataaagcactttgtcacccgtgagtgagaggtctgataaaagcaaaatattatcacagcatctgtgattaggaggcagctgcacactggagacacagccacatttatgagtaaatagaatttgtttctgtgctctgattatgagggtcacagtggtttaaccctgttgcggaggcctcagatacattatctgctcaaatagaactgggaaggaaaacaccggcggtcattaaaagcaaattactttgttgtacaaagatagaagggagaaggccgtggaaatcttgaggtgtggggccctgggggtgccacggaagggcagcatctctggaggcacctgcaggcgggagctgggacatgggagtgacccgccaatccaccggcagccagagattcaaacaggtcgagggctccctgcggcttcctggaaagctctcgggatatttttagtcaattctggaagctgcctagagtgcaggaggtgagggtgtctgtgccttctttacctgtgaaaacaaagggaaagatttctgcgagatgaaattggcccgtgtttctggtttttatttatttgtttgttgagaccgagtttcgctcttgttgcccaggctggagtgcaatggcgcaatcttggctcactgcaacctccgcctcccaggttcaagcgattctcctgcctcagcctcccaagtagctgggactacaggcatgcaccaccatgcctggctaattttctgtattttcagtagagatggggtttcaccatgttagccaagctggtcttgaactcctgactttaggtgatccacccgccttggccttccaaagttctgggattaccggtgtgatccaccgtgcctggctgtgtttctggctttaaatgtatcaaaggacttgcttgtgttttgatgcattgatgcattggctttattttcaaagtgaaatctctggccagggggcctctttggaaggagggctggcacagtgccatctctacactggatactgtggggagttaaaaaaagaaccaaaaactggccaggcacagtggctcacgcctgcagtcccagcactttgggaggccaaggcgggcggatcgcttgagcttaggcgtttgagaccagcctgggcaacatagcaaaaccccatctctacaaaaaatgcaaaaaaattagccgggcatggtggcatgcatctgtagtcccagctaatcgggaggctgaggcaggaggattgcttgagcctgggaggttgaggctgcagtgagtcgtcatcgcatcactgtactccagcctgggcgatagagtcagaccatgtctcaaaaaaagaaaaaaacaaaacaggccaggcgcggtggctcacgcctgtaatcccagcactttgggaggctgaggcgggcggatcacgaggtcaggagttcaagaccagtctggccagcataatgaaaccccgtctctactaaaaatacacaaaaaattagccaagcatggtggtgtgtgcctgtaatcccagctactcgggaggctgaggcaggagaatcgcgtgaacccaggaggcggaggttgcagtgagccgagatcgcgtcactgcactccagcctgggcaacagaacgagattctgtctcaaaaaaaaaaaaaaaaaaaggaaaaacaaaacaaaacatatctggaataggcagattcgtaaatggagacgaccaggggcttggtgcaggcgcaggggacgtcatggttaatgggtgcaaagtttgtgtggagatgacaaagaagtttggggtgtagctaggggtgatggctaccttgcatttcaagtgtatctgacaccactgaattgtacacttacaaatggtaagaatgataaatgctgttatgtatgttttaccacaaaaaaaaaaaaaaaggactagatggatgtagtggctcatgcctataatcccagcactctgggaggccaaagcaggaggatcacttgagtccaggagttcaagaccagcctgggcaacatggcgagacccagtctctgcaaaatttttaaaaatgagccgagtgtggtggtatgtgcctgtggtcccagttacttgagaggctgaggcaggaggatcacgtgagccacagagagccatgatcacaccactgcactccagccttggtgacaaagcaagaccctgtcactaaaattaaaaaacactttattgctaaaaaatgctaagcatcatggccctttagcaagctgcaatgatttcgctggtagtcttgcctcagtgtggtttctactgactgatcaagatggtggttgctcaaggttggggtggctgtggcaatgtatctgccttcctccctcactccctctcccttcccccctgcccctccccctcccctccattcccctcccttccttcttttttcttttgttagataaagggtctcactctgttgcccaggctgcagagcagcaccacaatcatagctcactgtagccttgaactcctgggcttcagcaatcctctggcctcagcctccggagtagctaggattacaggcatgcgccaccatgcccagctaattttttggtagcaggctctccatatgttgcccaggctggtctcaaactcctgggctcaagcgatcctctcacctcggcctcccaatgtgctgggattacaggcatgagtcgccatgcctggctgcaatttcttaaaataagacaacaatgaagtttgtcacattgattgactcttcctttcatgccaggtttctctgtagtatgaaatgctgtctgatagcattttacccacagcagaacttcttccaacattggagtcaatcttctcgaaccctcaaatttatggactattctaaatcctttattgtcatttccacaatgttcacagcatctttaccaagagtagattccagctcaataagccactttctttgctcatccctcagaagccactcctcatcggttcatgtgttatcctgagattgcagcaactcagtcccatcttcaggatccatgtctagttctagttctcttgctatttccaccacatctgcagtcacttcctccactgcagtcttgagcccctcaaagtcatccatgagagttggaatcagcttcttccaaactcctgttgtgatattttgacctcctcccatgaatcatgaatgttcataatggcatctaggatggtgaatcctttccaggaggttttcaatttactttacccagatccatcagaggaatcactatctatggcacctatagcctcacaaaatgtatttctcaaataagcacacttgaaagtcaaatttacttcttgatccatgggctgcagaatgaatgtttcatgtctgtgttagaaggcatgaaaacaacattaactaccttgtgcatctccatcagagctctcgggtgaccaggtgcgttgtcaatgaacagtaatgttttgaaaggagccttttttcttagcagtaggtctcaacttgggcttaaactattcagtgaaccatgctgtaaacagatgtgctgtcatccaggctttgttggtccatttacagagcacaggcagagtagatttagcatcattcttaagggccctaggatttttggaatgctaaatgagcactggcttcaacttaaggtcatcagctgcattagcccctcacaagagagtcagcctgtcctttgaggctttgaagccaggtgctgacttctcctctccagctatgaaggtcttagatggcatcttcttccaatagaaggctgttttgtcgacactgaaaacctgtgtatgaagtcaccgtcatcaaataccttagctggatcttttggagaacttgcagcagcttctccattggcacttgctgcttcaccttgcacttttatgttatggagacggcttctttccttcaaccttatgaaccaacctctgccagcttccagctcttctgcagcttcctcacctctcagccctcccagaaggcccttggagttagggcctggccctggattaggctgtggtttagggaatattgtggctggtttaatcttctatttagagaatattgtggctggtttaatctactatttagagcactaaacctctctccacatcagcagtcaggctgtttctgtcttattatttgcatctttactggggtagcacttttaatttccttcaacaacttttcctttgcattcacaacttggctaaccgacacaagaggcctagctttcagcctgtctcagttttcaacatgccttcctcactaagcttaatcatttctaggttttgattgaaagtaagagatgtgttactcttcctttcacttgaacttaggggacattgcagtgttattacatggcgtaatttcaatattgttgtgtctcagggaacgaggaggccccaggaaagggagagagatggaggatagccagttagtagggcaatcaggacacacacatatttatcaattacgttcaccatcttatatgggcaaggtttgtgggacctcaaaacaattaaaatagtgacatcaaaggtcactgatcatagatcacataacagatataataataatgaaacaatttgatacttgcaagaattcttggtaattgcaagaattaccaaatgtgacacagacatgaaatgagcacatgctgttggaaaacagcgccgacaaatttactttatgcaggattgccacaagccatcaatttgtaaaaaaatgaaatctctgtgaagtgcaagaaagcaaaaagcacaatcaaacgaggtcagcctgtgcttaatccgatgacatgtgtgtgtctaaagacctggaataagttaatcacgagaataaacggaccaggtagtaaaaggtaatacatacatattgcagactgaagaaaagacacaatttgtattgcatgtcctcgctcatttgtgggatctaagagtcaagaccatggaactcatggagatagaggatagaaggctggttaccagcagctgggaaggggagtggtggtgggcggcggggacatcactgggtaggtagggagggttaatgggtacaaaaaaatagaaagaacgaataagacctagtatttgatagcacagcagggtgactatagtcaataataatttaactgtacattgaaaaataactaagagtctgattggattgtttgtaacatagagtaaatgccggagggcatgagtgcaccattctccatgaagtgattactgcgagttgcttctcatatcatctcatgtaccccagacatatatacacctactatgtacccatacaaattaatatttaaagaaaagataataacaagacgtagtaaagctgttaggacccctcccccccaccttgcatttcttttacagagttatctactattacagaaacactgcaagcttcctattacaggcatggcccccctgctctgaagagccagaaccctcagcctcctgggtgcggccctgcctaaagcagggacgttgacagacgcagttcgcaggagccagctaagcctgaggcttaatgggccagagccggagcctcctctcaggtgcctgtcctgtccgagctttctagaaaagacgctgggcgctgtcatgctcctcacaatgtcccctgcccaggaactgatccttacgcttttttttttccttcctttccttcctttccttctttccttggcagaaaggctgctaagcgggaaggtgaactgcaatgttaacaaaaggcaaatacaaaactacaggctttgtcataaaagcaggctgtttcttccaccttctctgagtaataaaatacctacaataatacatatcaatttttttttttttaaaaaaacgggtgcacttctagcctgaagcacaagcagcagttccagtctccaagagtccctgttctttcgcttccagggcccacttcagcagtttcttccggacccggacaccctcagggcggcgatcgggggtgaaacgcctcgggccgagcccctgggtcactgcgtcctgagcccacccagcaaaccccgagcccaggcctgagcggcgcccccgaccccgtcccgggctggagaggccccgcccgcggcccccggcctgaccccggcccgccccggcccgcgggcgataaggccgcgcctttgttcctgcccccagctgggtaaaccgcgccccgcctcgctcgccgtctcgggggcacctttgtccggcccggggcgcgcattgtccgcacggtgtgtactcggggaggggcgccaggtgcgcgggcggaatgtagggtcggcgcggggccggggggcgggcccggggccggggggtcctcaggaagcctcggccgggcccgcctcctccccgagggtcccctgcagccgcggatgggggagcccgggggcggagcggggcgcggggggcggagcgggggaggcgcgaacccggggacccccgcgctggacaaacccgcggccgccgcccgttcctgtcgtgtccagcttgagacacacctggcgcgtcgtaaagtgatttacgaagtgaaagtgtgaaaccagggccaccagctggaggcccggccggctttaggagttttattaggtgccctattatggaaaataaactttaatcccaccataaaaaccaaatctgaaaaacatacttgcccttgtggtcgggagcgccgcggcatccctggtggaggtcacacctccgacgggattagttttaaggagggagacagcgctccgcaagactttgataccggggggctggggggcgcccccttcgccgccgcgccccacgcgggtcccagcgcccctccgcgccgcactcccctcccccggacggttccgcccggcagccccctccaagcctggggcgcactcagcgctgccctccgctggcgggggcgggggcggggtgggggagggaagggggaggccgcgggtcagttgacccggaaacctgagaggtgctgaggaacaggcccgggcgcccctccggagcagctcagcaaggaggggctggggtcggaggcgaggagagggagagcagagggaagaggaaaaggaaggaagaaaaaacaacaaaattatttttacaatcattgtgaccattcacgtgttagtaccggagggttaactatgtgcattatgcaacagacgctagaactttctcatcttcccaaactgaaactctgtccccaagaaacaccgactccccagtaccccactccgaaccactagcaacccccattctactctcttagagtttgactcatctaaactgatatttcacacgatcttgcggcatttgtctttttgttcatttgcttgcttatttattactatttttttttagagatgaggtctcacactggcccaggctggagtgcaatggtgccatcatagctcactgcatcctggagcccctgggctcaagccatccttccgcctgggctccgcagtagctgggacggcaggagggcacccccacgcagggccactgtttgtcttttgtaattgggtatttcactcagcataaagtcctcagagttcatgggtgttgtagcatgtgacaggattttcttctttttaaagcctgaatggcgctccaccgtatgtgtgtaccacattttcctcatccatttctctgttgatggacacgtaggctgcgtccacctcttggcaattgtgaagagtgctgcaatgaactcgggtgtgcaaatgtctctttgagatctttttgttttttccaattcttttggatatatacccagaactgagactgctggatcgtatggtaatttgactttttttttttttttttttttttttttgagccctgtcgcccaggctggagtgcaatggcacgttctcggctcactgcaaccttcgcctccagggttcaagcacttctctgccccagctcccaagtagctgctactacaggcgcccgccatcacgcccggctaattttttgtatttttagtagagacggggtttcaccaccttggccaggctggtcttgaactcctgacctcgtgatccacccgccttggcctcccaaagctctgggattacaggcgtaagccactgcgcccagcctgatttttaattttttgagggaaattctgtactattttacataatggctatgccatgttacattctgaccacagctgcaatttctccacattctcaccaacacttgctattttctgtgctttttgtttgttttatattggccatcttagcaggtgtgaggtggatctgtggctctgatttgcatttccctgatgcttattggtgttgagcatcttttcatatgtgtgttgccgtttcaaaattttatttggagtcatatctattcaagtcatttgcccatttaatttggttttgttgtagagtgctgagagttacataatctgaacattaacccattccctgattcgcgtgttgcagatgatatctcccatccccaggttgcctttcactcttgttgatcgtcctttgtggcgcgtacgtttttcagtttgatgcagtcccatttgtctatttttgctttggttgccttgtgttcagtatcaaagaaggaaagtcaccggatgagggaagggacaggtccacctcctctcccttcgagctgtttctttactccctgacaccagggattaaccggggtctcctggctgcctctcacctggcagccggagctccaggaggggctggaaaggagccccctgggcctccgtctggggggcgtgtgtgaactgttttctcccgtcacaaaaaaggcttcctccacatgcgtttgcacgcccggcagaattcgcccacagcaaggcccccctttctaagaagggaggagaacccacattggagcaaagaaaacggtggccaagaggtgggggcctcggtagggcaaggaggcaaggctgggttccaggggacagggtcagctttgggtggggcccagagccccgggtcgcagtgacggccgccgcaggggtctccccccgcgtaccttcgcttctgttgaaggcagtgagatccgcaggcctccgggacagctagaggacagcagacatgtcccgtgggggaagcctgggcctgtctgaaaacaccgcctcagctccctccggggtccccctgcgtagacctggcttcaggtccggagaaccggattcttgagggctgcaaagactttctcccccatgcgcggggtcagctggcggctcaggtgcgattggaggcctgggccccgagggaccaccgccccaggccgagccgagtcagcgaccccgagcgcggcgcccaggggtgggggtcgcgcccgcaaggcgggcagagccgggcctcgagaccgttcattaggcagaatgaattgttcaccgtgcccggagtggatgaggacgagccagtgattatatttaaatttgctataattgatttggggaagagctactgtgacaagaacgaattgatcattaaatttattagcgagataaattccgcggcgactgagcggcctgctggaggcgcaggggccggcgcaggtccggggcctggctctgctggaggacgggggaggggcggccctattaacagcgtcttcctttgatgtcgctcttccccgcgtcccagaggaagcgcctgtcccctgggggtagagggacagaccctccgcggaggcctggggcaccccagctccaggccgagcccccactcttccctggctgcccagtgttggtgagggcgctgaggctgggccggctgagcccaaggggaaaataatccccagatgtggggccagccaggggagagattgctgcaggctgaacctcaccaatgtgttagaaattaaaaagaaatgtagggattgcagattaaaaaaaaaaaaaaaaaaaaaaaaaaaagcatctgtcttccccccttccctctggttttcccaccctcttcctctgggcactctgcctcctccaccagtggcaaaccctctcccagttcccctaaacacctttggaccccaggcggcggaggcccggcccctgcgccagcgcccagcagctgcttctgcccggactcccagcagccgcgccccggccttggatgaggttgattttatggaaggggcccggggtgataatgagttgccagagaggatattaatctccccgcgccctgaggcagaggagtggctgcgctcgccccgcggtaatcacccaaatgaaacgccaggcccttctgaactcattttatccgctgggaggaggggaggggaggagggaggagaagggcacacgcaggtgctgctgagaaagtgacaaacagaaggaaggaggaaggcccgggagaagggataggagcggcgtccccgtcgcccgtctcctccggggccaggagaggccactgggtcatcgatgggggaagggggccgggagtcgcgccgggctgggtgggccgcgggcctgcgctcctgggcggacgagagcgcgggctgagcccgcatgtgtgcagcacatggcgctgggcctggctgcggtgattgatggcgcgcgctgcagaggctgattaacccggagccgctgcagccgcggtgtggagcgctgctgcagtccgccgctgtcctcgcggacttgtttgcacagagccaagaagaccgatcctggccagccaaggaaggttctgctaacagagagggccggggtcgaggagagagagaagcaccgcgcaattcggtgcgttccgggaaatgtgcctcagtagcgcctgaggtcacagggaccccacatgctactaacgcctagtcgttttaagcttattttctgaaacgtccaaatagcgtatttccacttctggagtgccaacgaagcaacagctagcaaggaaataggaaaataaatagagtccacagctccgcttccgagggacacgtgtcccgggacaggtgtgcaccaggcagccgggcatgcgctgacacctggccacaggtatttttgccaacacttcacattgcgactccccagtagcaggcgcggaggtggtcctgacacccacttgagactccgattttcaccctcagctgccaaccgccgagtagacaccctccccatcatttctacaagcaaattgtaatgccgcgggcataatcccccaaaactcgtgcacgctgatccagtacaaaaccaatttattttacattccatcgtgggcgatgggagaagctaaataataatttagcatgcatacgtagacgtttctttttatatataaatacaatatacaaaaataaagacagtacagttttgagatttccagcagtttgaacgctcgtgacataatccccccgaccccagagacgtaagcataaacccttttttctttttccaaatactctgcagaatggcggctccagaggcggtttcaagtttcataagtcaggtaacactgtgggtttccgccttctcggacgcggggaaaggggagacaggaggcttccccttgcgcggggtgggtcggttcttctcacacgcactcgcgcctcccccaacaccaaccaaaattaattttaaaagaaccagagttcaagtttcagccccctgggtctccctctcgctgtttcttgaagagcaggtgaggcgcccttgcttaaaagggaagcgcccaggaccggagccgcggccgaatccctccagccccggcctgggcgaggggtccatggggcggcggtcgagcctgctctcggggccgggccgggtgggtgcgggcgccggggcctccgggagaagccgccggccggggcgctccgtgcgcgccgcacctgctgggccgcggggctcctactggggcgcgggctggtggctgggccgcgggggcggcgagtcgtcctccgaggagcagtcggaggaggcggcgtggacgctggcgccgttgctgtaggggaaatggtcctcgtcgtcctcgtcctcgtcctcctcggggtcactgtccctcaagtcccgcaggcggcgtccgctgcccttgtctccgggcgctggcggccccagcagctcctcggctcccggctcctccgcgccgcccttccccgcgcccccgccgccgcccttctgtttctccgcttcctgcgccgcctgctctttggcctttttgctgcgtttccatttcatccgccggttctggaaccaaatcttcacctgcgggcacaagcgggcgtgagaaaccggccaccgccaccccagggcttcctgtccccggagtcccccggccgcgtgcgcctgggccccattgggtcggccctggaatggcctcagggtgagacgacttagaagcagaatggggagggggctcgtagcttcctcctccccgcaaccccccactcagcagcaaaccccagagctgggctggagctccgtgggagctaggactatgtccccaacgacccaggccggggacttttctacccgcgccctccgtctgcggaggaagggtcagggcagctggctacgtcgcggtaaatctcaggatgttccctcctctctttctggaacaaaatttctcgaatgcggcctggggatcaccttcttcagaatgaaaggaggggtggttaagtgctgattcttgggccccacccgaagctactgaatcggcgctctgggcaccttagatgaacccgtgcgcccgccgtctgaaccgtcgaggcgcagcgctagatgcctcagaccgcccgtgggtcacaagtgcaaaggtaacagtgtcccctgggaggccgggatgcgtcgggggcggggagggcgcgcacctgggtctcggtgagcatgagcgaggtggccacctcgaagcgcttgggccgcgacaggtacttgttgagcttgaactggtgctccagctccagcagctgctggctggtgaaggcggtgcgcggccggcggcacttccccaggaggttcgactgcgcctgggctggggaccaaagggcagtgaggcccacagccggctccggtcctcgccccagcccctcccgttgctgcttgtaccactacactcaaggccccagcgccaaggcctggccctgcagagggcggggctgttccctcactatcagtgcccactccccaaggaatgcggactcaggaccaccaagtggaaatggatagtttggagttaatgagaccaatttttttttttttttttgtctaggagacgtctgagtgtccctgttaaacagggcccatcgcaggaggcttcctctccacaggagccggctttggtagcagtggattgacccagaggcaagaggagaactgaggccagtcgggggccaggaagggaggttccgggaagcccaggagttgaaggctgcagtgagcgagactgcacccctgcactgtaccctgggtgacacagcaagaccccatctctcaataaataaaaaataataaaataataaaataaaggagcagtgagtgatgagaaccaaatctctccccctctcctcactgcgccttcctagagattcaggctcagatccaaacaggtctgggaagagctggtcctgctgttccaggtctccctgcactgcctccttaagacagaaaaggaggaggaggaggagaaaaagaggaaggaaggaagggagagagggaaagagggagggaggaaggaaagaaggaaagaaggaaggaaggaaggaaggaagggaggaagggaagggagagaggacaggtggaacaggaccaaacccagggtccaagtctgtgtattcaccagggaccctcccaccttccaaatgttttccttggcatgccccctcctcagggtgcgggcggcaggggcaaggcctgaggagactagaagccttttcaggacaattctcattacgcaaattacaggcagaggcgcaggcaggatccggttctctgtgtgttcaaggaggcctgcccggctttatttacataatttcgcacggttacatcacagagaattttatgacctcaaaacgagacttcccttgatttcccaggagcctgacaagtgttggacaataaaagaaagaaagcaaaggaaagaaaggaggccagccccaggcctggatgagctcaggtcccccgggatgggcagtttgctttagaggatggcccacgccccctgctttagtcaaacaaggccccgaattcccaacttgacaatacattagaactttaattaaaccactggctccggagggaccatttgggaaatgccatccaacaggcagagacaaccaattaaagaaaccaaacaggttttccccggaccagcgaggaggacttctcagaacacattccgccgtctttggcacggttatgcctgcccttttggattgccaggtgcagatacctcttctgaacttaagactggttgtgtttaaaatttggccaactctaggtcaacatttggaatcagaaataggcaaggtgtctcactttaataaattttctgagtgaccctgggctccacgaagctccagaaagcacccctaggaggcctaggaccacgggcccccggggctggccagccccctccgtgggcaacttagcgtccttggctctgggaaatgcaggtcatattggtggctttctatcagaagggatgggccctgggtcggcaccctgggtttaagcccaggctggcaggggattcgcagacgcagacgtgtctgaggtgaggggcagctttccctcttccagccagtcagtagggctgactctcccaggtgagggatgggtgaccactggggccttcttggagctgagctaggaaagcctggggcggctgtgggcaaacagccttctgcagggattcttctcaccctcttgtgacttctccagcctctggggtcctagattttctctgtttagtcacaaccacagcttccagcaaaggaatctgaattctggagtgtttatttctgttttcttttttgcttttcccctgctctgcctgcatctccccagtctaaacaaatccactcagacagaaacaatggggtctctttgtttgggtgttcggcggctgaaagcgttgagccatatacatctgctcggcccgactcataagtagctgaccccgatggggcgagcggggagagccagagccccagagagccagagccccggagccccagcccggagagtccgcgtgtgccaggaaagcctgaggggcccaggcctctggcgaggtgtcccgcccggatggagaggaagctgcccgaagcccagcggctctggggtggggagaacaggggctccctcggccccaccttggaggggcattcgttaccttgttgggcgcccaggattccagggcaggcacctactgttgagagtccccccatagctggttcaagccaggccacctgcctcggccatcgcaccccggatccaacgcccttccagaggagggcagcgccctggtaagagccgggggttccctgggccttggccttgcctccccgggcctccgaagcccatttctcttgtttgctgctcctgaagcactccctctccctggaggggccgcgggtctctctaacgccccagtgggggacctggcccaagttcctttccccggtgataagccctgacccccattcccgggcctgcctaattcagggcgctctcggctcgccttcccccggcgacttccttctcctgcagccttcgggttaatcattagatctcagtctcacacctccaactgccccttcccgttaagagaggaagagaaggcaaggcctgcgcatggccattttaataattcgctgcccgtctcatgcctgggggtccgggcgagtcctcgcaggccccgggcagagccgaggcggcttcgcagctcttcccccgctcgctgggagccaagcgcagagaggggcaggcggtgccggtggaggatgcgcgaggccctcccgccacgcgcatccacgggggccgcagggtactcacagttgaagtcgggcatcttaggcaggatcatgcccgcggtggacgcgcgcagccactggtccagctggaaggtgccggcgcccagcttgatggggtcggcggggtgcgcggggtgcgcgccttgcacctgcgggtacgagtaggagagcgccgggtgctggcccgccagcgcagccgccgccgccgccgcggagtagccgtagaccgggtggccgtagagcgccgcctgcgccgggaggcccgcgccgccctgcgcgcccccagggtgcagccccagcgccaggcccccagcggcggcggcggcggcggcggcggcggcagcggccgctgcgcccggatgcgcgtggtggtggggccccccgtgcccgccgcccgtgccgccgccgccgccgcccgcgcccaggaagcccggcttgggcagcagcgcgcagtgcgcggccagcaggcgcggcggcgacgggctctcggcgcgcaggcggtcggcgggcgcagccggcggctccgaggacgcggggctgcagctgccgctagtcccgccgctcgccccgccgccgccgccgccacctccggtgccagatgcggcggcggcgagcgacgtgaccaaggccagcggcgcgctctgcgcagaggcggctcgtggggggtccaccgccagcagggcgtcgatgcggaaatttttggatttttccatcggctcgtttggggctggcgctcagggcccggtggcgggcgacgcggccgtgtgcgggctcgcggagtcagtgcgtgcggtgcaagcccgggggctcggtattgttatggtggttatttgccaataatcaaagtcgccgccggaaactcagccgagggtgaccatggtcccggcgcctcctccgtgcgggccccgccccgggccgcgctcgcacaaactcccacgcgagtgcttccccgcgtccgggcccgggagcccggttctttgcgctgcagccctcaggcgaccgcgcggaggccgctgccgccgtggtggggacccgcgcccctccgcgcacttgaagctcagcgcggcttccgattggcgcgcgcagcgggggcccggggagggccgcgggctccgccattggccgaggggcgcacctgtcaccgtcccggccgcccgccgccccgcccccgcgccgcgaggtcctaagcagcccgggctgttgcgcggcgctggcgggcggggacaccaacggggagtggatactccgaggctcaacctggggcctctgcccgccctcccctgggtgcggagccggacggcgggcactggcaacccccgggcccctggagagccccgcggcggcccaagacccgctcccgagacacgtgggcccctccggacttggttggtccctggagccagctgcgcgcgtcctctccggcctccttgtcggcgctggagtgggtccacgtctgccttgcggagcgcggtggttccacgctcctgagcgcccacgctgcgcagacctggccgctctgcgaggcgacggcagcgcactgaagaccgtggtgtttcccaagccctccctgctctcgggcctccagggcgcagcaggggagggttttgtccccgtggccaaagctctgcaggtcgaaccttatctgctatgggaaggccccgcattttcaggtgtgtgtgcgggggtgtgggggtgtaaacgcgcatgtgagtgtgagtttggcctccacgaatcctctctgggagcccctgccccagtcaaggcggagacggtagatctgggcgctctggcctgcagaacccaagtcggcttgcagacgtcgcccacgtgcctgctcagtggagcgggtcctcggtgacaaggctcttcctcgctgccgagggatgcccatgggcttgcgggagtcaaggcccacacacctcggccctgaaaaacccgtggggcccggcatccttcggaagccctgccgctgcgacccccggccagtccccgggcaggagcggggaaaggctatgtctctcgtgctgccggggcctcctgggaagtggagaggaaagggcttcccgtgagtgagcgaggcacggagtgagcatccaggtctcacccctcccccacacgcacacttcaaatatttacagtaaaaccacttccaagggcgtttttgaagctgaaagaatccacacaggggtcgggaagtcaagcggcatcaacaccaggctttgtcaatagcgccattagacccagttatcttccccagcaagcgtgagaactgggagggagttccaggttccagggcttgctatgcaggtgagaggtgaataaaggaccggaaggggctgtggagaggggagagagccaaagagaaactcagtgccaggtaaacttcaaaattagcacgccaggttgctacaagagggatttttaaaaaggcaaatatagagaccttgccacttctcctcaaaaggcttttgacctaggcgagagttgatgacagtgactctgttgccatgagtggt

SEQ ID NO: 378 - DNA, 297816 bp, Homo sapiens
  source 1..297816: mol_type = genomic DNA
tcccacgtgccctggggaccctgcagctgcatcctgagtgtgagaccggcacgaatgcgcgccctggacacctcctaaggccgtcccacgggctccacacacgctccatctgaggctgccttggaggctctggctggaatcccggtgtcctcctagccccttcagccccagtggagctggcccccagccccctgtgccctacagcactctcagtccaatcttccacccagcctccgctcggcagccaggccccaggttcgccagcacacagcgacccaggctgtgtgccaggctggctccctgtggcctcagccaggagctccctgcacaccctagacggggcctcagccagagggtggccccaccaggccacccgcccctgttcttgccctccctcgccgggggacctccttgctacctaggccagcgccggtccctgcctcaggttcctacgctcagccccttcagtcaagttctgtgggtgtcctggggcctccactctgggggtccacgcagagcatcagaagacaagggtgggtggcacccagcaggcctctctctgggaactgggtttggctccaggcactgactcaccatgcagcccagggtcacggagtcagtgcgggccctcgtggggaggtggcggaccaggcggtgaaggccttagggtacgcgtggatgtcggaggagacgcccccagctgactccagacatgttctgagaagcccagaggctgtcagctctcggggtgggaggcagagacagggcaggggaagggcctctgacctgcagctcgatccctgggaaagccaagaaggggcctgttggccacaggtgcatcatgcaggctgagcccgaggccaggggagcaccacgacctgggcaggcccccctagctaagggggatggggggggggcggactgcccgaggtcactgtgcagcaggcgccatcggcaggagcccacagtcctgaagtctgaaccaactaggccctgaccctggaagccctctcttcccgcttctcagcccactcaggtcctgataagctccaggcttcagcttagggcccctctccctgcagcacgtgcccacccactcccaggctgaggacacaaacctgcttgcccctgggccacgctgtcccggccaggaatggcccctgcggcagagccactgtttcaggctggcccagagcccttcggagaagatgtctccagcttactgcagccacatttgagggtccccgccaccagcacggggagaggcagggggctgaggcagctgggaagagcgagtgacacagggtatgtgctgcccccacggcacctgcaggctggctgtggaccctcgcaggcagtgaggggcgagtctgctccaacccccactctcggggcagcctccggggtgcctgctcctggggctgcccaccaagcaagtggccgggatgcccacagtgtggggggggggcggtcaccgagacgctgagacgtacacaggctctgacctgagagaattctttttattacgagtgaacagatgaactaaggtaagcgggtctcagccttccgctggtgcagcatctccacgcagggcctcagccccgtcctggccttgcctgaggactgcaccatgggtgttccttgggcatggaggaggcagcaggaaggggtgacaggagcaggagcaggtgcagggcacctcacaccacaggcctcccccacctctgagctgccaacagccaagactcctggcgaggccgggagaggaggggtgagagggaaggagggtctctgtgaaagcaagccccacccccagagcagagcagagacccaggtctgcaaatcacaccctccccccacgagttcctcctttgaggccagcagcacccgagggagggcaggggctgcacggagaccagagaaaggaaaaccccacagaagaaaactcaaagcatcagtcccatgcgtgtctgctgaacgagtgaatgggcccaaaggctcttctctacaaacggcacgcatccatccgacagggggccacaggacacggccggggccgtctgcgtctgtgcctgtgcagcccacaccagtgcagcccggggccctctcagacctcaccacacgcgtgcccagcacatgtgtgcacacgcagatgcaggagagaacacacaccaccgtctctttgcacacgtgtgcccctgtccggcccggggggctcatctctccttcacgtggttctgtgctcccgggcccccgctgccggccccatccccactgcccccactgtggaccccgccggccccgctgcatagcacctcggtgaggtcgtccatgatggcggtctctttggggtccagcaggttgaactcccgagcaaagaggatgaagtggacgtagagcgtgttcaagtgtccgtgcagctccagggccagcgtctccttgaagtgggcccagtagatgtgtgccagcacgtggaacaggtgtctgcagatcttcctcaccagggactcaaaggagctggggaattctctgcctggggaaggccaccgtgtcacaagctgcagacatcccttggccccaacagaggccaggcccctggcacccagcctggtgggtctggtacctgccacccacaccttgaccctgccaccctcagggcctacaaagccccagcagcaacagcttctgcccatcagcaggcaccacagggacttgccaaccccgggtctgggctgctgagacctccctgcgtgctcaggctccggaggctgcacctgccctgagggctgggagctcgttgggccatcctggccacctcctcaggaaggggcctgtgatcgggcactcgggcccccgtggtgtctccctgatggacacttggggccatctcccgggccaggacggaggtggcgatggtggcacaggcctctcctgttgtcccctgccgtccctctggcagcacgggagtggcgtggagccccaccacatcccaccaaaatctggacacaggcttggcggctgatacccagcccaagtgcccacaagctggacggtgagagcagcatgagcggcagaaaccaagaggggcccagtgcagccgcatggcccagagggccagggagatggcccttggccctggctgggctgacccctgcccaagggctccggcctcaccccacagcccaggtggctccatgctaagcagggactggggtggtgcagctgccgccctccgtgcctctgcccctcccggcacaggagcttggtcacttgcagacacgtcctgaatgctccctgccccactgtgaggatgaccgcccagtgctgggggagacgaaccgtattttgtggggaacacgtcctcatccgtcaccagcttctgcacggagctcatgacgaagtcaacgtactgtggggccgtgcacttgaccttcttcccccgctcgtcataccagtagtactgtctgtggagacagagacacggtcagggcatgcgcccgctgcacacccacccagccactgggtcccacccgctcaggtcatctgcgggcagaggtggcgccagcagcggaggtgtggcagacccaggtgtctccctccctggacatgcacactgtccccacacactgtctgcggggaccacactgcactctatggaggggtctgcctgcgctgacttagaactacgccaggatcacgctggggagcctgccagccacatggctgtacaggtgtgtgattaaatgaaggggtcatcttcgttttctccgcttctacatggcttcagttgtattcgtttacacaagtgcgtgctgctgtttttctgttgtattttgaaagcacacagaggctccttctcttcccaggaagctgtgctgtggctcgccggccaggccccaccctttgggagagccctgctctgactgctagaagccaagcccctctccggggaaagcagaggagggcggtggtctctgtgggtacctgcggctaacagcctggccaggacagggacctggccccctcttgcccctgtacacaagggcggccagtcctcatgtgagactcgtggccccagagcaggctggagcatcctagggacatggacaccctgggtttgcctcttactgttgggtccagccatgacaagggtgtgctctagttcatgttaatataaggtgacccccagcccctaacacccctcctcccccagcacaacaccaaaacccagggcacccacctggcagccaccacccctctccccctgccacggtgctgggtctcagtcctccaaggccatgcccacagcggccgcccccgcaggcctgaaccagggcatgctggggccgatgccgcagccccacccacaggcagtggagagtgctgtggtgggagtgctcacacctgagacacagccaacactatgggtcgggatttcctccctgagagccagctcccagctcaccacaggtgggaatgggccacacagcacagagcagtactggccactgagcaaacgccccctccacaccatggccacaaccaccatcgcctccactgccccagctagaccaacaggcagtctgccagtaccaggctccacatgaaccgctcccaccctcctcatccagtcacggttcctcttggaatggccctgggtggggcagtgctgaaaaggatggacccaggctccactctggaggccactcttctcttggccagctccaagcatcgtgccctgggttccagagcccaccaaggcacctggggagacgccccaagggctgagacagggccacggggggctcgcccacttcctgcgcagccagagaagccatcctcccagctgggcacagggcctccagtgtctccgggcacagggcctccagcgtctccgggcacagggcctccagcatctctgggcacagggcctccagcgtctctgggcacccctctgctgtgtccaagaagcccctcagcctgtgcactgcagatcccggggggagtcaccagagttaccaagaagctagaggatgacactgcaagccctgcatgctggcaccctgccctctgcaacagaaacagccatcaggccacctcccagcaccaccagggccctaggacaaccccctcccagcacccacctccagaatgcaaaccaggagctctcatgtgtgccctgtgcggggctgactcagcccacccgaaggggaagtgcagccccaaaatggacaggccatgaggacggggatgcagtgcccacacctgcctctcaggtgctgtcctccccctgggacagctctgcatgaccttcacgcccaccttcccaggctgcaggcctcaccgtgggcatcgccaccaggctgtcagaccctctgagaatgcagagacaacagtcctttcagcatctgctcctcgagaatgatgtagaggacgcacgtatccccactgtcctggggttcccagatggtgtaggggaggcccagcccctaagggccaggctgaggcccatgtttccagggcgaggacccagccaggatggctcagcactctgcaggagtcagacactggctccaggtaccctgacactgcaagctgacatctgatgcacctggccacaggtgtgcgacaggtctcaaaacagtggaggttagagacggaaacccttttccacaatgcaaacccagagaaagcagtaactcagggacactgtggattgtcccatctgttctgaaagatggaacaccactgtttcctgtacttcttcaattatcagtaaaccgtttctggtatatagttctaagatttttatccacatgtggactcacgcattcataaccacaatcaggacacgcggcggcttacgtggcccctcacacccgtgctgctgtgcccccagcaccccggggatggctcctcagggatgggccgcgggaaggaatcgcaccgcgcggatcctcccgatctgggcccctcttgcacggaggcccctgggatgcagtcacgtggcagacgtgtcggaagtccacggctcctcactgcccagacactgcccctgcagagatggacatggcgtgctcatctattcacctgtgtccctgccagcagaacagagtcccaggtggccacatcctggccagcaccagtgtcccgaccggcatgtgggcaggtggacatgggtctgcccatggtttcggcttgcctttctctaattgctaacaacacaggatagccccagctgccatccttacaccctctttggcaaactgtctgctcatttcttttgctgacagttaactggactgttttgttttcttactgctgagttgtgtatgttctttatgtattctggatatcagtcctttgtgggatgtgtgatttgcaaatgttttctctcccagcctggagtttgtcttctttctcttaaaagtgtcttgaagcaaaagttctgaattttgctgcctagtgtcaggtcataaggatttcctatggtttcttccaaaagctttggagttttagatgtttgcacgaggcatgagggataggtcagcgtttggtttttgacacaaatgactgcttttcccagcagcatttttgaacagactaccctttctcccttgaatttattttgctctttgtcaaaactctgatggccccgtttgtgtgggtctatctccggactctccatccacacgtttgtgtggggctgtctccggactctccatccacacgtttgtgtgggtctatctccggactctccatccacacgtttgtgtggggctgtctccggactctccgtccacacgtttgtgtggggctatctctggactctactgtgttccatggagctctgtatccattccttcaacactgcacactgtcttaattactagagtttcacagtaagtctcaaaagtgtgagattcctcttattttttcaaaatcattgtagctatttcagttaatttgtccctccatataaattttagaactaactggtctatacttgaactctgctgggatttggattgagactgcactaaatcaacagatcagtttgggggagaatttgtgtttggagtcatcttccaggtgataaacgcagtgcgtctctccatttatgtagaccttcgattttctgtaacagcatttcgtagtttccagggtgcagatcctgggaatgtcttgttaagtttataactaaggatcgcattatttttggagctattataaatggcatgttaaatattaatttcagttttaaatttcacattgctaatatacagacctatgactgatttgtgcgtgttgacctcactaaatttatattattatttgctacaatccttgaggttttcccaatcacacgtgtgcacagggatacagcaatcccccccatccacaggggatgcactgcaagacccccaggggatgcctgaagccacagagagcaccaaaccctatatatgctgcgctttctcctatacatacattactaaaataaagacaggcagacttgattgattgactgagatagggtctcgctgtgttgctaagttagtctcgaactcctgaagtgatccaccgcctcagcctcctgagtagccaggattacaggtgtgagccaccacacccagtgtaattcataaactgaggacaatcagttgcagtgagtggctggggtcgcatatcagggggtcccttgctggcctcctgcaggctcaatggcaacacgctgctgctcccatcctctcacctcctccacccacagatccaagtactcaacacgcactgtggctgtcacttttgcaatttcagatgtaacagcgaaattaaagggactttttttccctttttcacaatttcataaagaagagatttgttcttaccttagatcttagcaacctcacacacaatctgtttctttctagtcaggaactttcaccttttcatctttaggtcaaggaagtgctttctgtcttctctttggcatatctgaattgccagcatcacgctcttgcgctttgggccgcctcatgtcacataagagcaacctgagcacgagcaccctggcactgcggcagtggatccacacgggggccgaggcacagctgggccgagggaggaggaggcacacctggagcaggacggtggagaccgcatcacactgctcagaacagcatgcagttgaaaacttattaactgtttatttcgggaattttccattaactattttcagaccatagttgactgtgggtaacggaaactgtagataaggggggcttattgttttatttcttttccaatttggatgccttttattctttcttcttaccttatggcactgcctatcttaggcgagttctgatatactgcgctttccaaagagttggtccatttaacccaagccatagaattcatgtgcacagagggtttttttccaatacttccttattatccttttaacatccactgggtctacagtgatactcctctttacatccacagggtttagtgacactcactcctttttattgatcattgcatcttctctcttatctttgtacctactaaaggcttaccaatttattacctttcaaagtcatcacattttgatttcactcatttcccctattgttttaaaaatcaatctcagtgctttctgttcttatttactttcttgtccttgattttgacttattttgctctttttctagtttaagttggaaacgtagattactgaaagtcatcttctttttctaagaaagcattaatcctataaatcccctctaggcactgcttgagttatgtctcacaaattctgacatgctgtattttcctgtgtacagtttgttaaagtttttttgttgaggcatcctctcggacccatggactactcagaattgtattagtctgcaagtgtttggagactttcctgttctctgttactgatttctaatttaaccccaccatggtcagaaaacttacttcgtatggttttgattttttaaaatttgttaagggctcttttgtgacaggtatgctccatcttggtggctaatctttgtgaagttgaaaagatgggtgttctgctgttgaggctgcagtgcatgtgtcatttcaatccaacccacgggtggggtcatcgggctccgtgctctcgctgactgtctatgaggctccatcactgaggagagggctgcaatccccggcgatcatgtgatttctacacaggccgtccgtttgctttgtgtggaaagccctgttgtctggcgcacacacatttatggcaggatttcttcaagagctgctccttttctaattagataaccttcttattcctggtcacttccttcctcggagtctcctttggcactgacatagccacttccgcttccttctgatgggtgttttctcagcacatcttgtcctcttacttctcacccgcctgcaccacagcacctagagtggtgtgacacacagggtgcttatgccccacattcctatgttgaaagcttaaccccagacgcaagggtatctggagatggggcctttgggaggcgatgaggttgcaagggtagaacgctcatgaacagaactggtggctccgtcgccctgccttccttccagcaagaaggtgctgtctgtggaccaggaaagggaccctcaccagacactgaatctggctaatcagatccagtgacgtggtcagtgcccccttcctggtccacagtggatcttcaccttggactttcagcttccagaaccgcaagaaataagattctgttgttcacaagccacctagcctatcatgtttcgtgacagcatcccgaatgaaatacaacaaatgagcttcttgtaaacaccagagagttggttattttaaaaatacattctcataagctgcccagtcccgtctgttcatctgttagcatttaggttttccactatttgctgtttgttgcctctgtttctcattccttatggtatttcttctttcctgctttctcttgggccactgaaatgtttttgtatttcatttaaatttacctattctgattctgactgcgtctcttcacataagctctgcaaggcctgctcaaagggctgtaacacgcaactcaaccccacatgctctccatggcacccacacatgtgcttccactggagcatagcagctctcttgcccacagccccaccgccgccaggccccacagccgccacagccccaccgccaccacaggccccacggccgccctggaaatggcactgcacaggccccacggccgccctgggaacggcactgcacaggcactgccggacactactcttgtcttcttgcaccatcactggcgtctccacaaacactcagtgggaggaggccctcctgttgggagaactctgcagggagcctctggaacaggtctgctggctgtgagggctcttggttttgagtgactttggacactgactggatgtggaattctgggatgacctttcttttctcccagcactggaagatgtgtggggcttccttcttccttctggcctcctgggtttctaaaagtgccacggtcattcactgcggcatctgttgtcagtaccaggccaccgccgtctgactgctgacagaggatggctgccaagggctttttctttgcccccagttctcagcatttggttgcatgcatctgcacgtgtctgtgagccttatttggggtttgcttagcttcttaagtctgcaggtttgtgtctttgtgggaagttctcagccattattgctgcaatgtgtttccggccccgccccctttctcgtctccctaggagtcagacatcagcctttttgggactgtcctacaggccctagcagggaggagacgcgcctcaatcccagagccctcacacgacccaggcagacttgctggtcttttgggtggcaagtggccctgaggccctctgagaagtctccatgtttctcttagtttgagtggatttctgtcccttggtttgaaaggattcctggaaaggcattacatgcaattaattcacacacatctactaccaccatgatgccagctccagatgagaaggaccaagaggcaaatctgggtggcctaggccctccaaggggacataggtctgcccaacaccacatcctacactcctccaaggaccccttttccaaaccaacccagtaccacagaacatgcaggagcagagcctctgggaagggtgccaggccccgtctgcccaggagcagaggcgctgagccagcacttggccacaggtggctccagagccacagtggacacaaggctctcgagtagctctcgggtgctgccctgccacctcaggacccatctccatgcctgatccatggaggccaccgccgtctcacattgagcttgctcccctcaaagccataagcactgtccccatcttcctgggccatgcctggctgtgacacctcattttcctggggaattaagacagtgaagccagctgttgtctgtacctgccccggtgtcacccataaccaaaccaagctgtgacccatcatggccatgagggcagggcccagcaggactgaagccaaggggacgcctgccagctgcctgtgcagaagctccccttggcttcttgaaggcagaactcagctttgtctggggaccacgtctccctgtgccagggccaggaaagccatgtctgtgggcaggatgactttcaggacgcactcacaggcacacattctgtccctgacctgtgtgcactgacaacaacgggacatcagggaaaagcttccgccctcctcagccgcacatgtcccaggctaagcccagcagacccagcctcctcctgcctgcagcctccaaggctgctttcagcaacccaggcctggcggcgctccttcccatgctacgcaagtgaggtgctcagggccactaacggacacccatttactgaggaaatcagggtgcagtgcttccaggagagagctaccagcaccaggcatgttggatggtcacggagaaggtaactgagcccccatgaaatgaatggccgagcaaggacctgtggcctgcccagcccagccctcactgtcccatccagagctgtcacgggagccagcggagaagggctctctgcaatcttagggcattccttctggaaacgtctctgtccctagaaacatagcccatcaacccccaccagctcctgcaccttctgggccccactggggacctgggtagctgggccactggcccagcctgtggcctttccacaggaaggtggatgttgtggaaggcctgtgccaagacttctcagggtctccaggtgagaacggaatctgagaggacaggagcctggggcagcgggggctcagagccccaccgagtctcccaagagaaagtgggctgtagccaggcagcactcacgtgttgcacacggccatcgtctgacacgtctctcctgtgcagaactcggagatggtgctatactgcaggttgatgtggtggaaaaacgtcgtggctggaagagaagagaaggagccagatgtgaaaaacgccagagctgagccgccccgtccacccctgcttccagcaacaggtgcaggagctcggctgggtgagctctgcccgtccacgggccacattctcccctcgcggcagggggctgctgagcaccagccgtgggggtcccccttgaggaggggcttcgaggaggagcagggaggagggagggggcccgcccccaggcccccgcgcactgttgctggccagccactcgttaaggtcaatctcgcggggcagcaccaccagctccttgaactggaagtcggtgatcctggccttggtgtgctcaggctccaggtaggccttcctctcctccgcagcgggcttcttgccattaggcttggctttggacttcctgccaagagaggagacgcggtgtggtcactacacgcccatcagacccagggtctgcccggggggtcagttgtggccagcgcaggtgtagagggagctgcccgagcccatcggggcgacactgcctccctgccaggctcaaaggacaccaacgggacaccaacggtgaggctgctccgcagaggggccagtggagctgccttgcgtggcacctcctgggaagaagggctggcgctcccacttgccacacgggcccctgcacggagggcatcctcacccctcaccaagtcctccaaccagggaggggcccagggtttagggcccccagcgcccaccttccagttttccagtgctcttggaaggaaaggagaagcaaaccctctcactcctggcttcttttgagttggccagcctgtccctgcccctgccgctggtggccccggtgaaaacataccacaggccttgtgcagggcacctgccttcctggccagcctgagagcacggggcccctggcatcaggcggcagcctggcctgcagctccagtatccctgttgtccaccaggcctggggaggccacagggtgatgaggatgggggccaaaggtctttgtggcaacctgaccctgtccttattttttttctttcttgttttgaaaagttgctaatggtttatttaagagaaagagaaaggaaaaatgctccctgaatgccagggaaatgtttccctttcagcttctcacagcagatcttcgccttaaaaggagaccagcgcaggcctctgggggcagtgctgggagtagccagagccaggcagggagcaggggcaggagcaggggcaggggcaggggcaggggcagggaggggcaggggcaggggcagggaggggcaggggcagggcccctgggccctggcactcccactctgccatctctccagagcacagggcgtggggtctgaggaagaggaagcacaggtgtggatgggccacatgcagcgtgggcacttggggtcctcacagtacaggggtgggacagacagggtgagcttccgtgtagcctgcagcccctcgccccagcacagcgaggcacccagactccacaccagcctgtgccaggccatgcccagcgtgtccaccacagggaaggctctccccatgacgctgggcctggccctgaccaccggcaggtgggcctgcacctccctgccctgtgctctcacagcacagcacaccacaccccacccgggcagctacagcctgggctcggccttcccatttggaggggtgggttgcagtggcccaggctgccaagcgggctacaagccgtctccctgctctgtgtcttaggagctgtgtcaactggcaagctccaggtggcagttacctggtggtcggtcacgcagggctgccagcaggagcagctgtcagcgcgctcactctcagggtgtgccccagggcccactcagggaggctgccctactggcagttcctgcccccttgccagccttccaggctggggctaccttccacctccggtcctcagagagggctgggcaggggcagaacctggagacctggcttccctctcccaggctctggctgtggtcaggaggtagtgagcagccgccactccggcactggcacctcagcctccctgcctcttcccgtccacacctgctctcctagaacacagaagaaaagtacgcacgaggccctccaggctgggcctccccgagctgctcccccagtctcaccctgtccccagcacccagggctggccgggccccggagcttagtgcactgtgagacaagcctcctgcaagcctaccttctttggaccgggtcactcattcccatggggcaggtggacgggcactggcccaaaggtagtaggaccaaggggacgcgcaggacatggcctctgctccaggaacggctgtgcgggcaccaacagagggacttccatgggaaagccccgaacgcctggcagcacccacgtctccctgacctcaagtgccctccttcccagaagggcaggctctcagcgaaggcccaggcctgggcaggaagcagtcactctgaggcagcccattgctcggtccaagccagcggcagctaccgaggaggcctcagagcacacgacacctccatggcactcttctcgtccttagtcattcttggctttgcccagtggagaaaacacctctgcggcgccccccgcaggctcacaggctctgaaacaggctctgtgccgtccaggcccagaggtctgcccagtcactgcctcagtggcccagctgcccctcacccagggaagtgccgaggccctgcgccctgctcccagctccccctgtgctgctggctaggagccccggggcacagaaagaccaagtccttcgatgtggagggaggactgtgggagcaggccccggccgcaggcaggacagagatggcgctgaagggactggggagtggaccctggacctcagcccacccacagggcttccgtgaccacttggaagaagcagaagggcagatgctgtgtgcacagcccccaaaacaaagtccctcacactattccaacaggtgggctctgagcctgggtcctgcctggcaggcaccatgcacttaggagggccgggccagatggaaccacctccttcctgcctcccacacactcaccagcctcacctccctcctccctgctctagatgacctgtcctgcctgccacaggggtctgcaccctgtttgtgggcaccagctgctgctctgccaacttgcccatcttacaccaggcctagcaaacttctcctggtcctttaagagcctgtcaaatgccaccctccccattctcgccagtggtacccatgacgtgccagtcggcctccttggcacccagcacgtaactgatccctactgggaagtgaggcaatccctgctagacacaaatttggtgggcaagggaaggggcacagggaggcatcagagctgctgggctcccgtggaaaacttagacaaccacacagtcaacacacagggggtctcaccctgcccacagcaggtgcacactgcttcacaggcagggggagctggggagtgggctgggagccgcccactcctcatccgccctgagggacgaggacagcacaaccgagtgccctgcacctttgccacgagtgtcaacttcattatcacagggatggaatcctggccaggccccacggcccacaggaatggggtgctccaggctcagagacccccactcgcccagagcacgcttgctatggaagtcgagcctgtagaccctgaggtgagtgggcagcagcaggaggtggccctcatctggcacttcccaccacaggtcaacgccaaggggtggggcaggcacgaggggcccagaaatacaagtccccaagcccaggcctggaaaatacggtgaccaggcagcgtgtggggtgcaggagaaaggcccgcaggtgacgcctctgaggagggcatggtccttggaccccactcagccatctgcaccgggcccctcatgctccttggttcgggtgaatgtcagtgctggttggtccacccagagcctgaaagtcaaggctcccagtgaccccttcccccaagacccggccaggcagagcccccagtagccacccggtacagagcctgggtctcagcacaccttgctgcccagggtgcacgccacgggcacctcctgtcaccccaacatgcagggagggcaccacatgctggggtgcttggcgccacccccacccctacatttctgatgtggccttctgggtgttgagggggggcctgaaaactgcatttctaacaccgtgttctaacccgagttctccctgggtgctgatcccacttctgtcacacggcctcaggctgaggggtgggaaggcctccggagcccctgtccatctctcagcacagcctgcactgcccacaggcttcagccagctggaagctgtggagtgtggcttcttttcttctgagtttaattgtctgcccccccaaacaggtcagcagccccagacaaagcgagcttttaccagcctactgtgccctctgcagaggcccattgagaaggaaaaagccaagatggcacaaggaacgcccgcagacatcccagaccaaacgtccaaacaggcaggtgctgctgctgtcctagaacctcagccccacgtggccaccatgctccactgcgcctcggcccctccatgcatccagctcccagccaaggtggcttcctcatcgcttcctttgaaaccttcctgagccccagggaagggactccgcccgtcttccttagggcctggctgggctccaggcctgcctctgtgtctcctgtggagctgccttcggcatttggcctcagacacacaagcacacactggcacaggcacacacacacacacgccagtcccctcacaccactgatgtcaggcaccattcctgatttgaactcacgagtactgccaacttgcccacacatttccaaaacctcacagtttcaccttaagataggacatcctaggcagggtcaccggccggcactcttgtgtctacttgtggagccctccctgttgaatgcacaggtgatcgggagatagggaaggagcctatgaagagaaagatggagccgggtgcccagggacaggcagaggcacggagatgcacacgggtgccgcagcccccggcccttggagggcacgtccagcaggccacgctcgcctcacacccccaccaggcaaccccacccgggaggacacactcactgctgcagctggctgtgcctgccccactcccccggcccctcatgcccacacacgggtgcacactcccacacacacgggtgcacgctcccacacacttgggcgcacactcccacacacgcccctgcacacaccgagctgagtggtgtgggcagggaggcacccccgcagcaggtcagagaaagtacaggtgagaaaaatgtcaaaaatggattttccggcaacatccctatggcagccagcacaaaaataggcacccgggaaccccatgccacttctctggacaaggccacacaaggacagactccgggtcacctctgcctgggtggctgaagcccctgcccagggcacaaacagccgcacgctgggacaaagacaggcacacctgctggcggctgaggaaccacaccctgtgggttgcgggaggacaaggcaggctcctgtgccggcaaggtggggtcaaccccgaaggtcgaggacaccaagacccgctcctctcccacagagcaacaggaagtgcaggcggctaaggaaagccccactgggcagggctccagagcaaacccgccaggctggcccgggactgcacagccgcctctgccctggacagcttgcgtgtggcccagcacagctcgctgcacagccgccggccacactgggagggcagccacggacacagtccgccgcctccccaccctgacctccttcctgggggcaagaacagggcagacagatgtgctacacacccctcccccagccaggctggcaggtgttacctgagcactttgctgacagcctgaagcaccattttgcagcagagtccactttgcagggactggccgggccgggcttggtcttcagggagactgcagtggtctcccagcatgagtgggcgacgggaaggtggggaggagaagcggggcggggtgccggctggccagcactcgcaaatgcctgctgccgggccctccagcctcactccctggccaatgggacgcctggcagagacaaacagctgccccctttccagaggcaagggctggccaaggctggtgaaacgagggagcgtctgaattggccttttccaagtggcatggctgccagaagaggcggtgggggtgggaccagaagggaggggacagggccgtccttggcctgcaagaagggtccatcagaaaggtcctgggctccacctcaggctgccagaagaggcggtgggggtgggaccagaagggaggggacagggccgtccttggcctgcaagaaggatccatcagaaaggtcctgggctccacctcaggctgccagaagaggcggtgggggtgggaccagaagggaggggacagggccgtccttggcctgcaagaaggatccatcagaaaggtcctgggctccacctcaaggtcctctgctgccaagcccccaggaaaggccttctgaacacaggcagcaactctgctgacgagctccaggtcgatggcactcccctctcccttgtccggcccagcctagcccagtcagtgctcgggccagggacggacagacggacagacagatgggccgccctgccctgcagtgtgtacgcagctggaggcactcaaagtggctttcctgctggatggccctggagagagaaggggccgaccagcttctgcggtgcctggacggtgctgggctgaggctgctgccagccaggaccacagggcacccagcccaacagaaatgcccacagcagctccccatgggggcgcacagagcggcacggccccggccttccttctggctggtctgcacacaggagaccaccacatcctgaaaatgcaaacacctgagagggcaatgctctctcctcatcctgagtcagcgtggaccccactggcagtgacagccccctgacaacacggggtcatcaggagcatcccccacccgcatgggagccatacttcctgtgcttcctgccaatcaagagaccccagcatctccagccactgcccctcagaagctgtcccagcacctctgtcggtgtgaagccctgtaggagtcaggacacagcctgaggtaccagctgctgcggggagcacagagccatcaggaaagcagccagggtaggctcacccccatcaataccagcccccatgggagttgtggtgtctggactgcacgcacacacacagcctgggcgcacggggagacagcacaccaacccagcacagacacactctccaggagccacagcagaggatggccccaggccggcccccgcctccctaagcagcagcagcagcaggcccaacaggctgcagtttcattttccccactaggccagtccctaagccatgctctgagcagtgcgtaactggtctctacagaacaaacagcccggtgaggctcaggacgtccatgcgcccacaggccttcctctgccttggcaaggccatcccacagccctgtggtgccacacgcacctaggcaccgtgctcacggctgccggtctgccctcgggggctccaccaacagcagggacacaggtgctggcaggtcacccaagtggcaaagggagccacaggaagagcgggctccaggcctggggaggcccccgtgagtagcagggctgggaccaggaggtgcatgacgcagacctgcccactctcgggaggcatggcctggacagagaaggccgtgcagaggcccatgacagggagaatgagctgctgggggttggagggcagagcataaaggaagctggggatggtggaggcttcgggcacaagaagccaggcaaccaggcaaggcaatggtgagggtggcacgggggcgggggaacagtcaggacaaggtgccgggtagggtggggggagcacaccaagcgtgcctagtctggtccaggcaaggcagtggtgagggtggcacgggggcgggggaacagtcaagacaaggtgcccggtagggtgggggagcacaccaagtgtgcccagtgggtctggtcagcacacggcagctctgtggcttatgccactgtcccgagagggctgggctggcgccagaggaacgtccacattcatctgtgtttgttcactgggggacacgtgcagggagcaggtattcctattgatcaaaacttaggtagtggggcaggagtggggtagggtgaggggcagctggaacccacagacactgagcgacagacactgcactgggaagaggagcagacctggagcaggctctgcagactccacgaggagctgccacagaggcccgcaggccagtgacgggtgccagtgtggcctggccccgccaccccagaaaaggaagagcaaaagcaccttctgggcacagccagggccaggagctggccaggaacagagagcacaggagcggggcagaggcaccacgcaggggggaacggtcgcaaccaaggcgggacggggcagggggcacgggccatgtgtctgtgtcagaggttattttacctttaataagcttttagttttagaaaagtgttagatttacaaagaactgcaaacacagaatccccatggccccccactcactcttcctattgctaacccttacactaggatggtctgtttgttaacaatgaacaaatccacattgatgcagcaaggtccaaacttgactcagacgtctggatccatccattgctctcctcacgacgaggctgggctgtgggtgtgggtaggaagagcacagagggaaatgtccccctcgtcgccccgtgcccacggcccgtcctgtcagcacggctcatcgcgggaggtgctcccgatctcctggctgaggctgtgactgccaggcctccccacgcaaagacgctctcgtcttccccgccccgcaccgcgctctcgaacgaagctgctgcacgcagaccacactgaaggggtggggaccaccccttaccaccctgacggaggagtagctacgggaattactggaagttcggcaccagagagcggcctcttcttggtcactcatttatatattcagccatttgtttatattgggatgaagtcctggctattgaggctgcactccgagctagaacacaacactactttgttttgtgaatcacactgtccgtccttggccctggggagctcctgccatcagctgctgggtcccctgatgcacccccatcaacagacttttcattttggggcatgtcctgatttcctggcactgcagggtgctccaggctccccctgcattcccagccccagcccgggaatcagccccttctccaaggagccctggttcttttcattagaaaatattaaaaactggccaggcagccgggcgtggtggctcacgcctgtaatcccagcactttgggaggccaagacgggcctcccacaaggtcaggatcacaaggtcaggagatcgagaccatccgagctaacacagtgaaactctgtctctactaaaaatacaaaaaaatcagccgggtgtggtggcaggcgcctgtagtcccagctactcgggaggcggaagcaggagaatggcgtgaacccgagaggcagagcttgcagtgagctgagatcgcaccactgcactccagcctgggcgacagagcaagactccgtctcaaaaaaaaaaaaaaaaaaaaaaatggccaggcatggtggctcatgcctgtaatcccagtattttgggaggccaagaagggaccatcacttgagcccaagagtttgagaccagcctgggcaataaagggagaccccatctctacaaaaaatgtaaaaattagccaggcatagtggtgtgtgtctgtgttcccagctacatgggaggctgaggcaggaggatcacttgagcccaagagattgaggctgctgtgacccataatcacaccactgcactccagcctgggtgacggagcgagaccctgccccaaaacagtaatgaatgaattcaaaactgagacctggtcaggcacgttgattcacatctggaatctcaagagcactttgagaggcccaggtaagtgaatcgcttgaggccaggagtttcagatcagcctgggcaacacagcaagacccccatttctaaaacaattttttttttttaattatctgggcatagtggcatgtgcctgtggtttcaacaactgaggagctgaagtgagaggatcacttgagcccaggaggttggtggctgcagtgaaccatgactacaccacctcactccagcctgggtctacacaaacgagaaacgaaaacactaagatcagagcactgggtgggctcgttgctagtgggtgtcactgcttccaggccctctcagctggaagaacacggaggcacatgtgtatacacacatgcactcatacgcctcaatctccacccacatgtcgacatttgtatctatactaagctaagcaggggttcccctgaggtctccagcccacccctgcagccatcactgcctggaccacactggcccctccacttgctcgtctgtagcctcccctccaacaaggagactcgtggagagcttcgtgtttttaatcactttgtgaaaacaacagaagaaggagctcaaaagctacggaagcagcaaaacaatgcccccggcaccctcacaaaggcacagggaaagtggggtcacttaaaagcaagcaggaaagtttcacagttgagtccaatgaaaatcaagaagaatagaggagagtaacactctcccactgacaattaaaacatcccagaaagacacacacataacacagacgaaatcacacaacacagatgaagacacacaacacagacgaagacatacacataacacaggcagagacacacaacacagacgaagacatacatataacacaggcggagacacacaacacagacaaagacacacaacacagacgaagatatacaacacagccgaagacacacacataacacaggtgaagacacacaacacagacgaagacacacaacacagacgaagacacaacacagatgaagacacacacattaacacaggtgaagacacacaacacaggtgaagacatacaacagatgaagacgcacaacacagacgaagacacgcgcataacagatgaagacacacaaagacacacaacacagacgaagacacacaacacagatgacacagaacacagatgaagacacacaacaaagatgaagacacaacacagatgaagacacataacacagatgaagactacaacccaataagacaatcagggaaacaatgcaatttaagaaaatatttgaggccaggtgcagtggctcatgcctgtaatcccagcactttgggaggctgaggcaggtggatcacctgaggtcaggagttcaagaccagcctggccaacaaggtgaaactctgtctctactaaaaatacaaaaattagctgggcgtggtggcaggcgcttgtaatcccagctacttgggaggctgaggcagaagaatcgcttgaacccaggagatggacgttgcagtgagccgagattgcaccattgcgctccagcctgggggagaagagcgagactttgtctcaaaaaagaaaagaaaaaagaaaaagaaaatatttgaaaaaagaggcaaaataagaatcaggaatgagaggataaaccatttttgaaatgaagtctaaattagaatacaaaaaccaccatgatgtccaagtagaagatgggaaggaagaatttcttaaaataataaaggaaagaagagatttctgcttccactcatgacagagtaactgacactggacctcacctccactgtcaacaactacaaactgggtagaatatatgaagtgcttggcttcagacccaggataccgccgtgcaggacggtggcccctgcgcacaggcgatgactgggagcctctcaggctgcaggtggggatggtgaaaccacatggggcctgcagtctggagaagctgaggtggcagggatggaagtctcaagccgctgagctgttgaaatttgcaggatgaggaggcagtcaggacagagctgcacagagaagggactctaaaaacatcaacagggatccaaggaagcttctggacaaatagctgagggtgtcagagagaacatctgcaagacctggcagagaacagctctgggaagcgtgaggaagagaggttctggaggccacacggggcaggagacagacgtgttcccacacccagactggagacaccttgggcgaatagatttaacagagattccacaatggctgtgccatggggactgggctacaatagcccagagtgagggggttctctggacctggcataataaagcttaaaaacaagcctcaaacggatcctagctaaccaagagcaaattaactgccttccagaacaaaccacactactctttaagggaggaaaacagaactgagactttcaacaacattgctaccacaatacctagtgtacaaaaaaattactagacaggtgaagcagaaaaatgtaactcataaccaggaaaaataagtcaacagaaacaggcctagagataacaaagataatgaaagtaacaaacaaagactttaaaagaatgaaataaatatattcaacgatttatttatttatttagacagtgtcctctattgcccgggctggagtgcagtggcacaatctcggctcactgcaacctctgtctcccaagtgattctcctgcctcagcctccagagcagctgggattacaggcgaacgccaccaagcacagctaatttttgtatttttgtagagatgaggtttcaccatgttggctacgctggtctcaaactcctcacctaaagtaatctgtccgccttggcctcccaaaagtgctgggattactggcatgagacattgtgcccggccaatatatccaaagatttagaggaaaggttggacataatcaacaaagcaattagggctctgaaaaaatcggaaactccacaaaataataaacaaaaattcctggaactgaagaatacatcgaaaatgaaatttttgagatgaaatgaacatcagattaaacagtgctaaagagaagattacaataaaaacatcacttataaaaatgtgtagaatgcagctaaagctcagctgaggaagaaatttataaatgttcatattaggagagaaggcttaaaatgagtgattcatacatccaccttcagaagccagaaaaaggaagtgcatattaaatgcaaagtggaaggaaataacagaaatctatgaaatgaaaaatagacaaataatgaagaattaaacacaaagttagcctggaaaacttaaaaaaaaaaaaagatcaatttcccaagcagactaagcagaaaagagacagagagccaagagaggaagagggcataaattaccgatatcagaaatgaaagggacattcctacagatcctacagatattaagcgggtaacaaagcactataaggaactgaatgccaagagaaaatgtagatgaaacagacaaatttttcacaaacacaagctaccaaaactgacatacaaagaagtagaaaatctgaatttataattaaaaatctttctacaaggaaatggtgggtgcaggtggcttacggatgaactctacacacgatataagtaagaaataatacaaaccatacacatactctttcagaaaacagaggaggaggaccagcataatgctgctgccaaagtgagacaacagcattcctagaaaagggaaattacagcccaatatccttcatgaatgtggatgcaaaactctgtaataaaatagtaacaaactaattcaacaacgtattgaaaggataatacagcatagccaagagagattcacccagtaatgtaagcttagctaacacctgaaaatcaatgtcattcaccacattaatgaaaggagaaaaaaatatggccatctcaattagatgcagacacagcacatggcaaaacgtgtatgcaaactctcagcaaaccaggaacagaagggaccatcctcagctgagaaaggacacctataaaaaatctgaagctaacatcaaatgctgctgatggagtaaagattttccccctaaaatcagaaacaaggaaggggctctgagcacttctcactctcaccactcttattcggtgtcactcttataccagcggcacaatgaggccactgtaatgaggcaagacaaaggtatacaaggcataaatactggaaaggaaaaggtcgtcttgtttggcaggtaacatggttatgtaaacagaaaagtctaaggaaactggggcaagtctgctagaactaataagtaaatttagtggcatcacagggcacaaggtcagtaaagaaaattaattttattcctatataatagcaacaaataaatggaaaatacaattataaaactgctatttacaatataatttttaaatttaggaataatcttaacacaaatgtacaaagcctctcactgaaaagcacaaaacaatgctgagaaaaattaaagacctaaacacataaaaaaatttgccatggccatggattagaagactcaatattgttaagatgtcaattttcttaattaaatacaatcctatcaaaatcccgggataatttcttatttttaaaagaaattaacaagaagattcttggttttttgtttgttttttgtttgtttgttttgagacggagtttcactcttcttacccaggctagagtgcaatggcacaatctcagctcactgcaacctctgcctcccgggttcaagtgattctcctgtctcagcctcctcagtagctgggattacaggcacccgccaccatacccagctaatttttggtatttttagtagagacggggtttcaccatgttggccaggctggtctcgaactcctgacctcaggtgatctgcccacctcagcctcgcaaagtgccgggattacaagcatgagccaccacgcccggcctaacaagaggattcttaaatccacgtggaaatgcaaaaggactttgaaggatccaaccattcttgcaaaagaagacccaagtagcaggactcacacgaatttcaagacttaccttaaagctacagtattaaacaccgaaataaacataaataaaacagaataatgttcagaactagacctacacttacatggtcaactagacttcaataaaagtgtgaaatcaatctaagggggaaaggaaaatgttttaaataaatagtttggagaaaactgagtatctctgaagaaaaagaaaccttcaatccctacctcacaccaagacggatcagaaactcagacataaaagcaaaactacaatgcttctacaataaaacacggacagtatctgtgccaagctcaaagtaggcaaagatttcctagaatgtaaaaagcactaaccaaaaagtgacaaaatacatttcatcaaaatttaatcatacacacacttctattcaatatactgttaagaaaaatgaataggcaagccacggatggcatatatccaacaaaagacttctagctaaactatagaaagcaggtctacagttcaacaataaaagagacaactcaacatttaaaaagggcaaaagactggaacagacattttacataagaagacaaataatggccgataagtacaagagcaagtgccacgccttccagaatggctaaacctgcacagactgagaacacccaaggtgtggaggaggcaggaaccaggagactgatgcgctacaggcagggcgaggaactactgaggaaaaagccacaactactgaggaaaagggctggcagtttcttggaaagttaaatatgcatgtaggattccataattccatggctaagtactgacccaaaagaaacaaaaacatacatccacataaaggctcctacaagaacgttcacagcagcagtgttcacaatagccagaaactggaaacaacccaaagtccatgaacagaagaacagctcaacaaacgacagtatattcatacaacaaaacaccactcagcaacccaaagcataaaaccaccaccaagatgcaatgcacagctaagccccacagatgtgatgtcagtgggaaaacgccagagacaagagcggggaccatcagactccatgtatctgatgtttagaaaaggcccaattagtccttgatgaaaataaatcagacagtggctgcctgttgggaggggaggtggcaggcaaacagggctgactggtaaggcatgtggtggtgttttccgggaagacggaaacattttgcatcttgacaggggtgtgggctacaggggaattcatattcatcaaaactcacttaactgaatacttgagatccgtgcatttcattgtttgtaaattatatgtcaacttctgaaaaactaaaagtttctacaaaggaggaaagagagaaagcatttaagagaaaatggcagacaaaattaaagggaaaaaacacttgcaactacatatggaaaaggcacatgtcacctcagaccaactcacaccaaggcgttctagtaatattactagacttatgacgaacagaaagtcctttgataaaaggtaagtttgcatacaaaggaaagaaaattgtatttccattagacaccagtaacactttaaatcaaaaggctattgtcatggatggaattcccacgaattcacaggttgaagcccgtacccccagtgttgtgatgctatttggagatggcaccactggaggtaatcagggttagatgaagtcatgaaatagggtggggccccccagataggattactggccttatactgagaggaaggttctaggcagaggtcagcagtagctgcaaacaacacaaaaagacaacgagatattatgcacctcctgtggtggaacacagccaccagcggagccaactggcctccaaagaagaatgagaatgcgatcaaggtctaaatctagctgccaatttacaggaaataaaaagaatgttctaaacaataccacagcatgcaattagcaaaattcagaccctgggagacatcacaggaagagcaggcaggctccactaacaaagtaagtggatgggaaaaaaaacaaacaggaagggtggagtggatccagagacatggggcggagcctgcagcctggtcaccactcggcacctgtgcccatcacctctggtccaatgtcgcgctccagtgtgtaaggtgctgtccctgtaggggctagctgagggtggccctggaatttgtgctatttttgcaacttcttatgaatttataatgatttcaaaatagaaagttaaagagtttcaaaatctgtcatccaagtgcaacgcatggaccttatttgaatccacattcaacactctaaaaacaagtcatgagacaccagacaaacataaaggcttgatactcaatgttatgaagaaatcactacttttggtatgataatgaaacatcttatgtttaaggaaaagaatccctctcctttacagacatacagaatagtcacggatgaaacatgttcagaatttccttcaaaatcatctgggtgatgcgggaaaattacagctgaggtgggtgtggctttgaacacacgtacccaccaaaatcactcacccttcttttaaaatcagttcatgaatccaatctctatcaaagacatgcacagaatttctccagagagaagctgccccgtgaacactccaactagtcttttccctaacaacagctttccatcggttctcccggctcctcggaacagcagagctacctgagcttagcgatttatactccatcgcagcgtcgcagccgtggtgggggcatcatggggccacaacggaagagctctacggtcaggtgtggctcgaggatgtgagctcttctcagcaagggtgcatgcacagcactgctggctcacaaaactcatgtgcatgtgtgcatgtgtgtgtgtatgcatgtgcacgtgtgcctgtgtgtgcatcagcacaaagccaagaggtcacagtgttttgcttgtaatcaaagatcaccacgtgttcaaggaagaaaggaaaataatcccttcctaggagtcaaatcgatccacaggaaaagtcccataaatggccgaatggcagaattagtagatgacattttaagtcaggctacctgtatcccacccatccagaaagccagaagaaacatgagacgtggtaaacagagataaagaagatttttcttaaaatccaaactggacttccagatgtgggcatgaagatgtctgagatgagcaccatgggggccgctgcagagccaaggtggctgaactcaaagacacagcagcggcaactctgcagaggaaaccagagcagaaaaggactgaaaatgaacagcccatgcctgagctcaggccacctaacaaggacaagccacaggctggaaaacattttttcaacacacagatctgataaaggacttctatctaaaacagataatgacctcttacaactcaataacaagaaggcaagtcacccaataaaaaatgggcaaaagactgaacagaaacttcaccaaagaagagagatgattagccgaatgaagcacatgaagagatgctcaacatcactggccatcagcagaacgccaaacacgagcacaggatgctgcagccacgcaagggatagctgcaaccacaggacggccaggccatgtgcctgcaggatgaccacagatgagcatgccacatgcctgcgggacgaccacgggatggccacaccacgtgcctgtgggatgaccacaggatgaacatgccacatgcctgcaggatgaccacaggacggccaggccacgtgcccacgggatgaccacggatgagcttgccacatgcctgcgggatgaccacgggacggccaggccacgtgcccatgggatgaccacggatgagcttgccacatgcctgcgggatgaccacaggacggccaggccacgtgcccacgggatgaccacagatgagcttgccacatgcctgcgggatgaccatgggacagccaaaccacgtgcctgcaggatgaccacggatgagcatgccacatgcctgtgggatgaccatgggatgagcatgccacatgcctgccacgtgcccaccactgtgccgagaagcagggccctgaggctgctggtggggatgcaaaatggtggaactggaactgctttagaatgcaattgggcagcttctacaagcgttaagcctatatccacctacggtctgagcactgcactctcagctacttcatggaaagcacacatttctactgagactcgcacacgaatgttcacggcagctgcaagtgtgctggtcagaaaggagagaacctgcacacccaccatggggaggtgacacagtgcggcctcagcatccacggaccgcgcctcagccacagacaggagtggcctgggagacacgcggaacacggaagactcctacagcaagtgtgctgagtgacggaggccaggtgaacatcaggttcacactgtgattccgttcacgggaaattccaggaaacataaaggtgtgaccacaatgacagaagcttgtcagtggttgggagcgaggaagtgggggagagaagtgtcacagaaaggcaggagtaaactggaaccccagggtgatgggtgtgttcctctccctggctgtggctgtggcttcagggatacacatgcatatgtccacacttgtcaagctgcaccctttaaacacaggcggttcacggtatgtcaagcagactgcagtaaaggtttaaaagaaaagcaactcctctctgggctcctggcccagtgcctgcccattgtccccattagactaatgggcatctcagacttgaggcattccttccagaactggctcctcgggtgtcctctgcaactccagagacacttgctccatcctcccactgcctcagaggaatgtgggagtcctccctggacccctctcagaccccacatccatccatcagcaggtcctcacggctctacccacaaaacacgccggggggtgtctcttccccctacgtccctcacccacacacccctgcgggcctcctgtgccactaccatggtctcaggcaggcccccttgtgcccccaccctccaatccactctccacatgactgggagtgtgatcctggcaagtcagctctgatcccaccccctgctgctcaaagcccctcacgactcctgcgccatgcagcgaatgagcctgagtgctccccacgccgcctttgtgccctccccacttcccctcgctctggtccctcgagtctcctctgtggcctgggcacccagcacattggcaccgcggggctggccacctgtcctttgctgtggctggagcgctcctcctcagacatcccattttccggtcggccactcatttcttccgtctctggctgccctacctggcgctcctcagcctgcgacagacaggcacatctgtccagcactcctgttacaatgtaaggcctcttgtgtccactatattcccggcacccggaacaggagggcaggggtcttgtgtccactatattcccggcacccggaacagggggacagcaggcagtcaatatttgctaaatgaacggaagaaatgccaagtcagcatcagagcaagaaagcagctctcaaagcagagaggtgctgggtgagtggagggcaagcgaatgaaacctgtctccccttctcacccatgttctcagtccatgcccgtgccctgcagttgcacagtgacatccagggcaatgctaacacccagggtgccaggggatcctcaggggggctgaacctctccagccaggtgtgatgtctgcacgaaacactctgccccggtgcttaccagggctcagtcacccacactagggcggacgccagcactaaatgcgcactcaactagaagggaaccacagccccggcactggccatggtggcatctgggggaagcagacctcgggacttgtggcacctgtgccaagggaagggactgggggagagccaaccacgtgccctgtctgttgaacgtgggatctggcccagttgaaaagggcctgcggcagggtggccagctaggcagtgagcgtcgggtctgcggctcttcccgtccctccaggcttgcctcccgccccgccaccccgcaagtgcacatctgcacacacaaccacctcctgtggctgcactgctacctctcatctgcttctacctcctttgatttgcctccaaccccactgcgcctgccatggagatgggaggccaggggacgaatcctgcacccctccacacccagccagaaccaccaccgtctctctgtgcctacagtcaaccctcagcccagccatctgttcatacttgcggccttcctcgtgcctgatcctgcactggacgattccggtgacactgagcattcatcactagctgcaattgtgttaagggacagagatgagggtgccggacaactgtacatgagggggctgctctggagatcccccaggcctgctgccagacgctgaagccccagccctacccagtgcacagatacacagctccacacatcgctgggctggggtcccatcaaacctcagctaggaaggcctgttccatggattacccacgtcctcctccagcccacccaggccaggggcctcaggtgccaccagagggaggaaggcctgatggtcagccccggggtcagcccaaggtgaagatgtggcctcataggtccacaggccctcgaactgcagtgtcctgcctggtgctgtagggagacggccctgctttttgtccccaggcctgggcccccatgactcccaccaggcacgacctactggctcctgggcacctgactttgaaaagccagcatctgacaccctgctctcctgcagatccttctatgagcagatggatacctgctccaggcagtaccacgcggccaggcgaggacaccctggcagcccccagcgccctgagggagaaaatgtggcaccacaggacatcctgggttccatcccagctcccccacagcccaggtggggccatcaggccagagtgctgctcctggggagctccaggcacagcgtgccgggggcgctccgggcaggctcccctctgagctcaggtcacacgccctctgctcacggcgagcccaccacagcccggacctgtggccagtaagcccagggtctcagcatttgaatgtccaaaccgataggctgcgggaagaggcgaccagggaaggggaagggcgtgggatgagggaggcctcaggggtgaggggctcaggcgacaaagaggaggagggctctggatggctggagagaggcatgtgcagaagagagctggggaggaggctttaaatccacccaccaaaagcacagtgaggcggggtgcggaaagtgtgtgaggttcggctctggactctggccaaggcacagaaagctgaggctgcccagcctgcagagcctgtggagaagggatggggaggggaaggctggcagcccagaggaggcagacggagaagtggacagatccagacagccctgggccgcagccagacatgggcgcgaggctcgtctaacagggctggagccaggccctggccctgacccggacatcctggatgccacaccacgcacactgtcacctcaggtggcactgctcatccccatgtagaagtatggaatccctacctaggccctgtcccaccctggagacagaaatgaggcagccccaggtcaaccgagagacacccccaaacagctccttcctctggctccagactgggccctgtccaggtgaccgcacacatggtctgtagtgccggacacaagggcagatggccaagaccacagaggccacaggagcccacagagccggctgccgcactgcacagctactaccgtgggtccccagaacagcgggcaccccaaagcagggcccctgcgtgggcacaggtgtcccccacacactctcatacattgatgtctacaaacggccacatctggggcaacttcacaattggatcgggttcctggggcaagatccacttgtcaggaaagcacagacaatggcaaagcggcttctcagtgcctgtcacgagtgagcatggccagcacgctctccagagcacatgggagagtctggtgaggggcccttggtctccaaggtcacatggcacccgctggccctgtgggctcctggacttcactggaagtgacagaggtggctggcaggcgctggccaagggcgcacccggctggggtgtgggagccactcctcgcaagccgcatgcccgggagagcactctcaggaagaggtccagaatgagcggcagccttctgattgccaagagaaagcgccacccgctcagccctggctggggcagctcgttcctgccttccagtcaccagaagcccacagctgagagcctgcagaaaaggagatgcccccaggcagaaggaggccagagagcccaggggatgcagagagggtgactgcctggcccgcccacccatgatgggagcagagtgctcctagaacggagaggagactggcaggggcaaggaggtgggagggagcagccttcagctgcactccagatagcatccgctgccctttctcagcagcttacgcaatttatagctgagaaatggcccatgaggtcgaaaatcacaatgacagctgcaccaagggggatgtcagccctgggagggcgagaagaagggaggtctggactcaggaggcagttttctggggccgccagggccttgtccatggaagggctcacagcacctgcccactgggcagcccacatggctggcggctcctggcacccacgctatgctctcagctgccccagaagctaagactgttaaacaaggggcactgaaaaaccccaggtgacaggagagccccatgtgtgaattcttccccacagctcccttcagagtagactcagccagctagagaactcaaggtggaggctgcagcgagcggggagaaacccacgctgtgtctgcactcacgcgagtccaagacagccagggcagggcactctcgggactcccagaagacccccagggcttccgcagcagctgtgtcacgagacatctgcggcacagagtgcctaggctaggccggggacctgctctcctgaccacacaccaagcccggcagccacccgagggtgaactgaggggaaggggaccgcactggggcacggacgccaggcacagacaccgaatggctggctttgtcagaagactctaggcaaaccgtggaataaaacgcgagggaagggaaagagactcgttcacagagaaccttctaagtgccaggcctcgcatgacattggcgtgtgcttcccaggcatcccccgacttcagccaacaggccgctgcagggcagacctgaacagacgtgcacagcctcaccggaccctccgctaccaaggaggcctttgattggaactcaaggctgcctccctctaaagcacggtcctgttgcagaaaaaacaaatttagccaccccagcccaacactttgggaggcctaggtgagaggatcacttgaggtcagaagtttgagaccagcctgggcaacataaggagacccccccaccccatctcaaagaaatcttcaaaattatctgggcgtggtggtgtacctgtggccccaactacttgagaggctgaggtgggagaactgcttggggccgggagttcaaggcgacggagctatggttgcgccaccgcactccagcctgggtgacagtgcgagaccctgactctctaaataaatcaatgatagttaaaggaaacacaaatgtgcgttttaggaaccaaacacactgcctttgaacttggttccaggacccccaaaaatggcttttgaagcaagtaagccccgaggtagggatcggcaacactacccagaaaggaaccacgcccacatcaagctaaaggttgacctgaaggggcgctcttacagggcctgcccaaagaagggagtagctggattctgagaacagccagtccaagagcagcgctccagccagctctgaataaccaggcttcagaacccctcgacttcctcaactggcacccccgagacctgtccctgcccattttactgataaggaagcaagctcaacaggatattcatacagggtcctggcatccgctgatggcgttttcggatctagaaaagagaccctgtacaaacactgaaaagtaccactggaggttccaagcctccctagagtcctggaataccacctctgtagcggcaggggcagagaaggttttaaaaaaaaaagccgggcgcggtggctcacacctgtaatcccagcactttgggaggccaagcagggcggatcacaaggtcaggagatcgagaccatcctggctaacatggtgaaaccccgtctctactaaaaatacaaaaaattagccgggcgtgctggtgggcgcctgtagtcccagctacttgggaggctgaggcaggagaattgcttaaacctgggtggcagaggttgcagtgagtcgagattgcgccactgcactccagcctgggtgacagagcgagacgccgtctcaaaacaaaacaaaacaaaacaaaacaaaaacaaagaaacgtctcaggagccacctgagaaaagctgctctatgacttcggacagtcaggagcactgcatggagccttggacgtccacgtggagcctccatactgtgcatcagaggcagggaaaactggagttgccaagcaagtaaaaccccggctggagtcggggagagaccactcaggacacacatgtccatcggcaacacaaatcaaaaggagaccacagaccatgaggaagacgcagtctggactaggaggggatgggcagatggggcaggtttctgcagggagagccactggtgcaggggtgaacatggccccctaagccccgcacttcccctcacacagcagccaaggctatttctgtgctgacccccgtgctggcagcctggctctagccttcacacgtgactgtcccccaagaggggacagcagcatgtggaaggggaaagagcttattcctacatgcccggcccagagcgcagcacaagcccatcctgccctggctcacctcctgttcccaggggggcactgccctcctagttcccacagcccagtcagcagaggaggaggcagaggaggagaaaatgccatcaagtctaccccaaacccacccctgctcctagcaagctggccaacaagcctcacaccaaacaggaaagcacccgaaacacaacagctttcttccacgccaccctagtaggagacagtgatagcctctcctcctagtgcaaggggcctctctgccacagctgacctggaggtgccaacgtccatggggcctggacaggctgtggcgctgccagcatgcagagaaggactgaagcaagccagggccatcgtagccctgaaagaagtcccaggcagtgccacagggctcgtaccctcagacagtatgccttccaagcacagcacagcccgtgggccaggggacatccaggaaggaagacaaggggggccaggctgggggtcaagggtcctcctggggtaagggtgatcagagactgccaggaggccaagagccaggtggaggccatgcagaaggagccacctggagccatcggcggtggggctgggggccgagatttcggtataaatttagaaggcagagtaatgcaccaccgcacctccaaaactgtccatttcaagctcaagtcaagccaaactctgaacaattaaagtggctactggagcctgcctagtcattctcccggcccccagccaccactgactgcgggagggcaggggcctccagggatctctgacccctctccctcctgatgcctgcatttcgctcatccaggaaaacccctgggctggggggcaggtaggacttaagagcccccatctatcatgctgctgaaaaaagtggaggagcccccacactcacctgctcacagcaaggcggtggggcgtggactgatggttaaaacaaacaagagcgctcacgatccctcaggagctcacaggctcagaaaagccaggggataggtgagaccctgcctctctgtcactctgcgctctccccacccccagcttcacagagcccagcagggcccaggccgcctaagaacagggtggtggagccctgccaggccacgctgcccttctctggctggtataaaaaccttggctgcaaaatttagtccaggctgagtccctgagtcccacaggaaggaagctgggagccccacaagggaggaggagtggcctgcgagagcacaacccccaccccacggccccctggagctggcgagaagtcagcccgaagcgcccactcgccggctcctgaggacgcctggctgtggggaccctcttggtcacgggcctgaccccgggtgctgccatggccacctggcctgcaggggctcaaacagaaaaactggaaatcaatgtttttgtcagtatttttttccccaaaaaatattgagatcagtcgagaaacagcttttccttagaaaaatgccagagagaaatggaaacgtgccctggcgctctggaatggggtggggcggtccagagaagggcacaaccccgagagacgcatggaggtgactggtgccctgccctcccccctgcgctctggaacagtgcggggggggggggggcgcctccagagacggacccaaccccgagagacgcatggaggtgactgtgccctgcccgcccctctgcgctctggaacggtgggtgggggtccccagagacggacacaaccccgagatatgcatggaggtgactggtgccctgccctccccctcacagccctcagcaaagccacccgccataggcctgcgggagaacgggcactcctgatgtgcacgcaggcagctctgggtgggcagggcagcttcctgggcacacaccagctacactgcaaagggtgtggtcaaacgtcactgcacagacccccttgaggtgacagttcgaacaaacaccatcctccctgtcctgctgtggacgctggtgtggggtgcgcctgggacagggctctggcccgaggtgtctggtaaagcgggtaacagggtggactccagaaggctgggaggaaggcaactgaagacccggaagcccactcccaggggaaaaggacaccgggcgggcaggggctgctcctgcaggggcacattcccctctaataggaaacgctgtttttgtctgtgaaactggagaaaatgcgtcacatgcgggagaaccccacattccaaggcaagaggagaaactacagcgggaggcgccacggcccacacttcagattcctcaagtggggtccgtggctgaggctgcgcagggaggagacacagcacagggtgcccttgggagcagaggggtgccaacagctgtccccacacagggcgaggcctggcctggcagcctggtccctcatgcacagtgagttccacgcagcctctgcactggccacccagccaaccctgacccagcctcgggcctcagccagagaatcctcctcaaacccaagtcaccagggcctgcctctccctctcagggtcatgcacgtgccccctgaggccagccttaccccggagtcctcagccccaggagcctccagactgttcctcccacccccaacatcattactgccagcctttgcccaatgtcatctaggagaccccagcttccacctcaaccagagatgccatccgctctgtgtcctgctgggtcctaacagtccaacaggagcggaagcaggagtgcagcagtgattttctgctctgtcctgggagctgagaacaggggcagtgctggcagctggaacctgaaagcgtttgagtgagtgagctgctcatatacaaataagaatgtgtgcaaaccaataagaacaaaatgaccatcacccctccccaaaaaaaggggcaaagaaaaaaccattcacaggcagaaaataactacaaatggttaataaacataagaagatcaacttgcctaatttagaagcaactgaagacaagaccttccaatgacagccagtgccaggcacccccagccgagaagctcctcagaacattgagaatgtaaaatgggaatttatctcaagtattcaaactcggaatgactatgaataataaacctgaatgaagcattgctcataaaagaaaatgctggaaactgcctaacactcgcagggtctccttagcaagtcctgctatgcagtcatcaaagagggagaagagcccagtgggcagggacctggaggtcagcgccagggctgcgaggcacccgggaggtgagagccagggctgcgggggggacccgggaggtcagagccagggctgcggcggggacccgggaggtcagagccagggctgcgggggggacccgggaggtcagagccagggctgcgggggggacccgggaggtcagagccagggctgcgggggggacccgggaggtcagagccagggctgcgggggacccgggaggtcagagccagggctgcagggggacccgggaggtcagagccagggctgcgggggggacccgggaggtcagagccagggctgcgggggggacccgggaggtcagagccagggctgcgggggacccgggaggtcagagccagggctgcgggggacccgggaggtcagagccagggctgcgggggacccgggaggtcagagccagggctgcgggggacccgggaggtcagagccagggctgtggggggacccgggaggtgagagccagggctgcggggggacccgggaggtgagagccagggctgcggggggacccgggaggtgagagccagggctgcgggggacccgggaggtgagagccaggcttgccgggggacccgggaggtcagagccaggcttgccgggggacccggaaggtcagagccaggcttgctgggggacagctggaaggtacacacctccagagctttaggggtaagcctgtgtattttactttctttatatttctccgaattgttggaattttccatgttaaaatacatcatcaccacaatcagaagaaaaaaaaaatttaattttgggaaaagtgaaaagacctccaaagaaaatgcccagaggaggcattttattctagtttccaaattttcactaatcttccttttataattgaaaaaaaaaagtgcactatctacattctaacagatttttgagaagtacatacaggaaaacatttcacagtttcctaaaaacttaaacacacactcgatgatgcctgcctcactacgcgcctggaggcttgtctgcgaggaatcaaaggaatctggtagtgatggctgaaaactgggtcccagatgctcactgctggggaacagggacatcagtcaccgaatctgcactaagctccaagaggaccaactgccacacgcagtgtgctgactcaccagagtgggaaaaccacgcagaagatagcggggccacagggagcatccaccccacattctagaatggagagagccacacagaagacagcggggccatggggagcatccgccccacattctagaacaggcaaaacctccagcaggacgaggagctttcctgaggatggcacaggctgcaggcactgcccacacagacctgtaggttcaccaaaacttgctgaattgcatgcctgaaatcacagaattctgccgtatgtaaacaacaccttcaacacagctgcttccaggtgtggtagctcacgtctgaaatcccagcactttaggaggctgaggcaggaggatctcttgagcctaggtcaagaccagccaaggcaacacagtgagaccccatctccacaaaaaaaataaaaattagccaggcatggtggcgtgcacctgtggtcccagctactcaggaggctgaggctcctgggatgtttctatcactgggaatcgtgacttttcacactgcaggggatgagcctggtgtgtcaccggccttgcctcctggggctgtctgaagctgctgggcttctggatgtggcccccccgtgggtgtgcaaaatcctgtatcataaaaaaaaccagctgctcacacgcacacttctccaattcaagcagaagctgctgaagcacaaacaaggtgatggctgtggagatgggctggggggctgggcggccacccccatcaggtgggctcctaggtggttggtaccacggccgggacaactcactccatcattagaactttcttcaggatggaacacagggctagggttgaattttcctccgttttaagaagtaaactagttttccctcaaagggaaatggtttcccctcaaactgtctttaacaagtagacactgcacgtagaacaaggaagaatgaaaagcatgggcgggtaccatgaacacatgtgtgtgtcaggactgcaggcaacaggcacccctccgccagtctcaggtaaggcgccgtcactctagttgcttacactgaagccaggtgcagcctgttcagaatgtggaagacccaagatgggcttgaggcaagacaggtggcagaggtggccccccagcgaaacacagctggggaagagccctgggcctccccggcagactccaagtggttcctgacgaccaggggcaaagtctcatctctgactccccactgctggcacagccacacacggtggtcctgctgcccactgcccactctctccgcatccttagacccttcctctctcctcacattcgacctcctcagaacttcctgaagtgggtgcttgggaagtaactctttcagaactcacacatcagaaaatattttcattctactcttacatcattgacaggttaactgatgctgaagtctactctggaaatccttttctgactgcattttgaagaccatcttctactttccaggttggaattcatattctggttctcagtacactgtagataacctggtgctacgctctgaatgtgtcccccaaaggcatgtgctggaaactgaacacccagtgctgcagcgctaggaggtggggcctggtggggggtgattaggggtggggctgggaggtggggcctggtgggaggtgattaggggtggggctgggaggtggggcctggtgggcggtgattaggggtggggctgggaggtggggcctggtggggggtgattaggggtggggctgggaggtggggcctggtgggcggtgattaggggtggggctgggaggtggggcctggtgggcggtgattaggggtggggctgggaggtggggcctggtggggggtgattagggatgcgggatgctctgccctaggaatggattaatgtgattctgaaagggcttggggctgtgagttccacctcttgcccttccacctctccccacgaggtgacactgcacaaaggctcttgccagacatgggaccctccatcttggaattccaaacctccaaactgtaagaaataaacctctgttctctgtaaaccactcagtctcaggtattgtttcagcggcacaaacagacgaaggggttttgttttgctttgttcttctctctggaagttgtaaaaatatgctctttatccctggtgtcttctggtgtcgccttttcattcactgcattggacactgtgtgagcccatttcatctgtgaattcatttctggacaactgtggcgttcctttggtgatttcctcccttctgtttcctgctcttcctggaactcctaccaagctacagtgacccctgcctgatgctcggtttccgtacctttgtgctcctggtgtccatgcctgatacccgccctgcgcagtcggcctgctgggaagggcgcgcagcaccatctcccacacctcactggctgtccgatcctcctctctcaggcactctttgctgtgcaccggacgctcctttctgtacaagtctgctcttgctacgtggtctttacaactctgaggagacccacgaacgctatgctttactctttggtttgggctggcttcctgctttttcatctgctttggtctatctggtgacccctgccccctcacatcacatgtggcaggaggcactgcaaagctcactgatggctctaggtgcacggagggggcttcgctgggggagtctggctgtattcaacacctttccagcatcacaggaaacgacttaccagattgaagggactcacccagcatccacgtcattgaatgcagaggccacatcagggaacacactgacatttcagaacactaagggacatgggtggcccctcctccccactcccagtgcccaagggttttttctcttggctgaggagactcccattctctgctggagggtggacctcagctgctggggtcctgaggacccggtgtgggaggggcagaaggggacctccctggtggatgtggaaagctgtcaaggcttcatgtgcaggatgatgccctccactacgcctgggtctcagcggacagtgctatgatcccacgtgctcggactaatcctccagacacagatcagacatgaatggggtgtccagctgcttctaaacacacctccagcctccagaccagctctgctgtcttcagctccaccatccaaggggctcccagactccatgggagccatccacagtttctcagtgaaaacacttcccctgctggtcagatttcagctttcctgagtttgcgttcattccacccgaccctcagctttccaacttccaaaatgtgtctgctctcgtctcctctgcactctctgctcctgcagatttctgcctctccgaaactccctgggcgcttatccaagtggggtcgagaagcagggccagcacagaggctcactggtgctcatcagccagagccctgtctctctgctcttcagcatcctagtgggacgggagcacccagggaacacaagtgcaccatgacgcggagcccttcatcaccgcaggccacggcgcttgtccttcccagaggcccccaaccacagctgctgagcgacacccacaccgcttctctcttcacacagcggactgatgaggagtcccgccaagcaggagctctgagccacagcacagagtgtgctggcccaagtccacgcctgcatgcaagctcagccatgcgtctaatggcaataaccgtggaatgagctcgtgaggttcggagagtcccaccccgacggggagagccacagggagccccaatctcggcagtgaccggctccaggtccccacgtaccgtgagagtggggacagcggtggacagcagcccttgagcagggcacaaccttcagagagacctcgacaagtgaacacttaaaccaaggtcgaccctgggggaaacgcagacctcctcccagtgcccccttcagaaaaggtactcaaacactggctcccatcatgagctgggcacggaaccaggcatgggtactacctgcctccagggcttggagctcgggaggggaaccaatcccgggccctcgacctgggaggtgccagaaggccctcacacaagactccagcactagggtggggaggttaaagtaaacaggacagaggggttcaactaagacaatacctttgctcacggtcagaggcgaaggcactgatgccagccggcgccgactcaggtgagcacacaagctctcccgccgcggctgcaccacatgcctgataaagggacagccctggatgtctagttcctcaggcacgtgtgcacacatgtgtgctgcgtagcactggcaccccattcctgttctgccccaggtagctggtgcattccccggtgctcaccggctcgaccccccagcaacacgagagacctcacagagggagtcacactaacgtggtcggggctccagagcgaaaccccaaccactatgctcacagccaggaccgagcaggctgggccaacggcagtccctgcccagcgcccggctccctccgagtggccagcagcgccctctggtggagactggctcggcctccgcggcactgcattcccacggcagtggtccatctagtccccaagtcctagaggaggcccctctctctccctcagccctggcagggtccttggcgcccattctccacacctgcactccttggccctccaggaattaccggcctcaggggcgctcctggaagcagagaaggggatctgcctggaccttcctcagaggcacagccttcacagaggcacgaggggctttggagcagaggaggctgccacttatcagccagacggcctgggctcaattcccagctgcagggccctggccagtgacatcacctctctgcattttcccacctataaaatgggaatgctgacctccagcatgtcctgagcaggtagaagattgtggccctccccggggaatccaacaccagcccctggacacccctggatgctcctgggcatggcaagaccagcaaagtcacctcccagctgcccaaaaggagtgtccacaccaacaggggcagcagtgacccgagtgcttctgaacacaccatttgggcaatcatcttcaaaattaacagaaccaaggtgacgagaaaaaaggcacttctatggcaagctctgctccgagtggccatgaagaagctgaatcttctagctgtgcaaacagaaggtgccaagtactggctgctttctaggtctctctaggtctgactgtcatccccctcctatcagccccagggcagtacccaaaacacccactgctcagcggtggccacatgaatcagaagcacggcatcctgaggccatggtaagcaaatcacaggagacggctggtaatgaggacacgaaatatgctcggcctcaccaataaacagagcagcctgatgcatgtgaaaccacatgccgctgatggagtggggggcagggaaagactggcacccgccctgtaggggaaggggacagttagacagtggtgaaacctccacatgccactgatggagcggggggcagggaaagagtggcacctgccctgtaggggaaggggacacttagacagtggtgaaacctatcaggccagagggggaacgggtgcccgttcttagacacaagcaagggagagacgagccagtgcgggccctgctgcttgagcactgcacggtggggtggagtggaccgccacaaacaggcagaaaggagagagaaatcggagtccagtcctgtttgcagcagggctgcgttcaaatgcagagcctgcaggggatgccgttaggcaggatccagaacagaggaggaacccatttttgtttcagacaaagaaaggaagacaggcatgtcccggtctagcacacaggcccctgtggggagggatggaggcttcagtgctacttttcaccactgtaaggtgaagcatgtgactttacttttatagtctctcttccaacgatgaagaaaaacattacataaaccaaaaaataaaacacagagccacaacaagcccccccaggacagttgggccagtgcccagcctctgtggcccccgttccaggacgaccccaggctcactggagaggatgcaaagggcagagagtgcccaggggccaggctgcccggccccacctccccggccagcagcactctccggccctccagagccacaatgggtacacgctaccctcatgtgccggctccaccccctcaccttctgggggttcaaccccctgcctctccttctccaccaccctccgccatgccacaaacagctctggctgaggccaccctcagctggccgtgtcctcaattcccatccctgtaacacagggcaggcacctgtggaggctgatcatggcctcccctgcagccacccgtcacagctccttccagctccttctctctcgcaccagctcttcctgttgtcaccgctacccccacctctggctcccccaggcagcacgctcagggtataccagacagctcacctccagttcactgtgtccagagatgtctgacacaggtaccgtgtctgcctctgagaggcgcccccaacgcctgccatctctccacagacgatgccccaccacaactgctcagggactcccggccgccatctccaccacctccctccccagagtgaggcttgtcaattccctccgttatcggccagagcaccctggaagggggtcgagcacagctgggccagacgcaactcccacctctcagttcttcaggcaggctcctatcactttgtccctccattttgccacctacataacagggtcacggtaagcgccctgcagggtgtggcggtgagcagggggacagtcggaactccagggctggtcacggcagcacctgtgccagcactgtgcccactgtgactctgcctgatgtcacagctataggcctaactagccacataaccacagagaaaggaggtggctgagaaacaagggtctggggacagtaggaagatgctgcctgctctgacagacaccccccaccccacccgctgccccgatggagcccacttggccatatttgacaaccccagacaggatgcagagggacactgccctccatgactcacctcaaagagctcacttggaaggggaaaggaagggccatgaaagggtgaaacgcaatggcttctccctcccgtcctactgtgtgtccgcagcggttactccgcagagccgccaggtacaacagtcaagacatgggaaaacctcaacgcccaatgatggatcaagggatggggaaagtgtggtgcacacgctccgtggtgacccccgcgagactggcctgcgcacagggacggcttcacgcgtgtgacagcaggggagcaggacctccgggccagacaagcctgcggggagctgggcccccgtggtccctggagccgcctgcctagggctcgtctgcacagccagccgggccaccctttgtctctgcagcaatggttccgggtagaacccaagaacgtgcatttctaacaaggtcccaagcaacccactgttaagtttcacctacagctgcctccttacatattttaagttccacctaaaggtttctttgtacatcgtgaactatgacaagtacaggtgtaaacagatcatagcctatacttgtgccaatcaccaagttttggccaatcatatgtaggtaactgttcgagctgtgttcaaataaggcaaatgccgagcgtaaccaatcggctgtttctatgccttacttccgttttccgtaggtcactttccctttccataaatcttcccccacagggctgctctggagtctatgagcctactctggctcaagaggctgtcaatccaagaatcgtttgttgttcaattaaagacctttacattaagtttttcttttatcactgcccttgctggtgcccacaccccacctggggaaccattgccctacagcgccaggcacacacctggcctctctgcacctccattctggggcagagatgcaatggggaccaagtggggccgtgtgcacccagttctcagcggcacggtgccggcacgcagcagactccccttgagggtgagtgagtgtagcagagggacttcgatgcatgctctgcagggtcctccacacacccccagcacacatccatccactggacacctgccccaggactgccctgggactccgaacccaagaactcactgcccctgcctcccagggaaggccagcaagtgaaggaacgaaggccaggatggaaaggaacaacagatgtttccagcaaatgctaccatggacagaaacccagcatgctacaggggagcaggaggctggggtgtgaatctgggtcatttctgggcagcccctggccacccaggcagaagcacaggaaacagactgcggtgctgaccagagatgcaggacacggaacagagcggtaagctttacaccagtgaggacggcgagtgctggaaacccggaggcattctagttgtcatcacaaggggggacaccaggagaccgtgtccacaataacacacagtgggctttataagaagttaccccaaaatcaggtgttcaggataaggctgtgctggaaaaggaagctcagatggaatcaagagtgtccagaaatcaccagctgcctcacttgacacaagctgtctgctcaacagactttagaattcccaacctcataattagtcaaaagggattttaatgcaaccattcagtaatatgaaatcaagaactatgactgcaaaggagattgaatgttccttttaaacaacgtaaaactaaatactattgaatcagtggagaaatgaaaaacagagtcttgctaattttcattaatggagactgctttaagtctttcagtttatgaccagcctaggcaagacggcaagactctgcctctataaaaaaatttttttcaaaattcgtggggcacggtggtgcgcacctgtggtcccagctactcaggaggctgaggcaggaggatctgttaaacccaggaggtcaaggcagcagtgagctgtgattgcaccaccgcactccagcctggtctctaaacaaaaaataaaaaccaaaacaaaaaaactatttcggtaagaaatctaggctgtaacaaggccatgtggggactgcccactgtttctgcagctcactctgcgggcccggggtcagatccccagtttctcagggtcgtgttctgttccctttgctcatctctcctccagtccccagggaagggcttggtctccacggcgtcaggaactagactgtgaacttgcacgtcaatactgagagtggggcttccagagagcagccgtgcttgctgccctgcccctctcaggctgcagcccagggagatgccactgagacgctggccatcgggctggccacccccgggctccctccatcctcacggtcctgctctgtgctggcagtttccactgaagtccccctcccagtatgcagcaagcctgatctgctatcactcgctcacaccatgcctccgtgtctcccccacatctcacatgaagtaacttctgagcctgtttcaaagtttatcctgaacagggcgggcagtctggccccttcaccatctctttctgtgtgggtgcaccgaggtgtctccctgcagaagtgcattctatcctatgctggggtaaagatgcaagtcactctcaaactgctgagaaaagacccacgtgcaggtactgagagagagaaaacggcaaggcagatgtggcagaaacgctgacactggccaatctgggagaaggtatgcaggaattattcacactactttggcaacttctaactttgaaattatgtaaaaatttaaaaatataaacgtcagaagcagctggggccaggaggtggcagataccctcgagggagcagcagtgcatctgacagccgcttctccacagcaacgccggaagccggaggtcggcggcctcacgtcgaaagagggctgaaagcaagccaaccaagaacacgacacacagcgaaaagctctgccaagaatgaaggacaactgaaggcattttcagacagagactgagagggcgcccccagcagagtcacctgaaagaaaatccaagaaagctcaaggctgcagcacaagcagaggaaaactggtcacagacgcaaaaggacaaacccagaaggacaaaggaggaaggagagggtacagccaaagagatggagcacaaaaccagccaacctaaataaataccagcgtacaagtagcatgtgggggtccgaagtgtacagaatttaaaacacagcagtagcatgtgggggtccgaagtgtacagaatttaaaacacagcaagtgctcacaactcaagaggggaagtacccagaagcggtctagtatcttgggtacttcggggaggcggataaagctgttaatcaacatcagaccctggaggtttagcgtgtgctgtaagaaaaccactaaaggagggtgtgcacggtggctcacagtgtaatcccagcactttggaaggtgaaggtgggtggatggcttgaggccaggagtctgagaccatcctggacaacacagtgagaccctgcttctacaaaaaatcaaataaaataaagtacctaacttccaaggcaatttgaaagaaggataattaaaaaataaaaagaagaaattcaaacaaagcatgggaagatgaaaagcacaagatgggagttccacacagcagcgagcacaccaggtggaaagggttagcaaggcgccctgacacccgctctagtggcgcggtgctcactagacacccgctgtcacgtgcagtgcgtctaaggcttggggttttcccgggctcaccccaggggagacgtggtcaagggctctttcccagggctcggggccgtttgcacgtccttcttcatgaggcatctgttcaagcctctgcccatcttctacgggacgagctgtttcttgttctttgttggagcccgtggggaagtctggatctgagctccggtaagttctaggtatggtaaattccccctgcaaaagttgctttcttttttttttgaaacagagtcctgctctgtggcccaggctggagtacagtggtgagatcatggctcaccgcagccccgacctcctgggctcaagggatcctcccacctcagtccccctgagtagcggatgccaccacgtccagttaatttatttttatttatttatttatttatgaggtctcactatgttgcccagcctggtcctgaactcctgggctcaagcagtcctccagcctcggcccctcaaagtgcagggattataggtgtgagccacggtccccggccagccttttcagtttttgaggaatatctttgataaacagagctgcttaattttaatgtaaaccaaattatctatcttttcctttatgatgagtactttttagtcctgtttaaaaaaacttttcttaacccatgggtcaagaatagcatcttctataacagtgctgttcaagagaaatataacacaagccataatctgagccatggatataattttaaatgttctaatggccccattgaaaagtaaaagaaacagccaagattaattttatttaacccaacagatgtaaaatattttcgacttacaatcaatacagaaaatacaaggtgccactgtatttttttcagtctagcgtattttacactcagcacatctctagcgctgccaagctacatggctggaggccgtgctggacagcagttccagaaccttctacacttagacctacattctactgggctcaattattctttgtagggtgtgaggtacaggccaaggtttttttaaatatggctatctggttggccagcatgacttatgaaaaagactggctatctgtgccatctctttttccctgtcttgatcactcttgccagattttccactatattcctgttttcaaagaatccaactctggcctcgatgactatatctgtgggagactgactttctgctttgttaacttctgctccagcctcatttccctccatccaccgtctctgagcccagctactgctccgagagtgacgagtacctgagggctgtgaaccgctcctggccggtgtgcaccctgcaagtctcagcatggcatatttttgttatctttcagctaaaaagtatgttgtaatttccattacaaattcttctttgtcccactggttacttggaagtgtgcttcctaatttctaaatactaggagtatcactttgctgatttctagtttaactccacttgggtcaagagcacactccagaggaattcaattcaccgagataagcggaggttttggtcaacgttccatcagcgtgtaaagggggcacacagcctgtcaggggtgggttccctattcttcctgtcaggtgaaatgtgtgaatctggctttgaaatcttcatgctgacttgtgagtacagctgagctgctgggacaaaggcccaccatcccaggccccaagtccttccctggtgttagcccagggcaggggtcaaacttcaccctccaacaccttcctggggccccagccatggggcagccctgttctcaccaagggctgtcgaggagccgcaggaaggcaggaagaagaggaaggacaagcatcttccagacggtgactagaaagctccacctgcccccacctatgtctcagtcctgaagctcaggacacaagggaggctggagttcaagtgcctgagagcccacagccagagaagcttgcacggggtcagaaagacagacgggagtcagcaggtcacagccctgtgcccacaacaggtggcaggaaagaagctcagagacctgacaacagccacagcaaggacatgtgtgcacacaggccaggtgtctcggcagaactgcagacactggagggccagccaggctgaagtgcacatgggccacacagggtggggctggagagagacaggggacttcaccccacaggcaatgggggtccaccaaagtgccttgtatataggaggatgacatgtggatcctctcaggtggctgtgtggagcatgagtcaaagataaggacatacatccccgccaccgccaggtgcctatggctataagagcctaggcctcagcccagggaactgcgggcttgcttagggaatccagcaaaaccctcacagccttctggatggagccccatggcatggatggcgaggcgtgaggggaggcaggacgtggccttcctgagcagcaggctcgaggcacgggacacacaggccaccaccacaacttcaggctctgtaacagggacctacccacgcaaaaggtccttatctgaaagggctccatcctcaccctagagccctccacacgtcattttgggggacattttatttattttattttttatttttttgagatggagtcttgctcttgtcgcccgggctggagtgcagtggcacatcttggctcactccaacttctgcctcctcggttcaagcaattctctttcctcagcctcccgagtagctgggattacaggcgcatgccaccacgcctggctaattttttgtaatttcagtagagacggggtttcatcatgttggccaggatggtctcaaacccctgacctcaggtggatccacccatctcggcctccgaaattgcagggattacaggtgtgagccaccgggtcccatttcattattttgattagaaatgaaatgacctgcccaggcgcggtggctcacgcctataatcccagcactctgggaggctgaggcgggcggatcacctgagctgatccccagcctgctggggaaggggaaggaaggtggccacaggccccagcatagtacagactgacgcccttgaagtccacactgcaccgtgggcccagacagaacaggcctcccgccccgccctcacagaggtgcctcgtggacagccactgcatggcatagcaagtccctggacccaggcctgtccagaccctcgtgggagtgggatatgagctccacaaacgtttcggggggcacccaggccccaagtccctgttccaccaccagggcagctcaggagccaggacacttagctagtgaaccctgggacctgctgcactccgggggacactgaagagctcgggagccgacaaaccacaaatgctgctacttagaacctgtgtgtccaacaaggagaagacagcaaaggagggaagactgctgggcaggagagcacccgagacaccaccactcctaccaagaagtctctgaggacaactgtgggccaggatcctgcgtcgtcagcacagagctgccttcggtctgccttggagtaagggcctcggagaggcacggggtcacagaaaacaacacttttattttcacatgaattataaatacccaggaaccctcacacaattcagcttggcccagcacttcttcagccaaaaaggtaggaggccttcccagcaggaataacagaatgtacttgaagataaaggttttaatgaaaaagggtttctaaacctcctgacagtggccacctccagaaaagcccctgggtctccacactcacagtgcaggagtgaatgtcaaaaagcactcccaaggcagggcacagtggctcacgcctgtgatcccagcactgtgggaggccaaggtgggcagactgcttgaggccaggagttcaagaccagcctggccaacacagtgaaaacccatctctactaaaaatagaaaaatttggccaggcgcgggtgtctcacacctgtaatcccagcactttgggaggccaaggcgggcggatcacctgaggtcaggagttcgagaccagcctggccaacatggcgaaatcctgtctccactaaaaatacaaaaattagctaggtgtggagtacgcctgtaatcccagctactagggaggctgagacaggagaatcgcttgaattcgggaggcggagactgcagtgagccgagatcgcgacacagcactccagcctgggcaacaagagcaaaactccatccaaaaaaaaaaaaaattacactggcctggtggcatgtgcctataatcccagctactcagcaggctgaggcatgggaatcgtttgaacctgggaggcaggcggaggttacagtgagccatgattatgccactgcactccagcctggatgacagagcaagaccctgtctcaggggaaaaaaaaaaaagcattcccaagaccccaagcacgagaggaagcaaatcccttctgtgcatcccaacgcagagctcatctcagaaagctctgcgtccaggtgtccaggaggcagccagctggccaggcagaggcataccctgggtggtcagacccatccagcgcctgctccctgccctgggcacgccaggtacagcaggggtacgtgtgggtctgtggagaagatgaagcctgccctgaagcagtatttgttacacatttatgaaggcaaggaggacacaggaaactgttcagcagaaaacgctgctgtcacgaagggagagatagccagctttgggaaatgaaggtgcccactctgccctcaaggaagcagcaagcctcaactgcacacccgccacacagctacccaccagccccaggcagtctcaggccacacatcccagaggccccgtggcatgaaaagaggatctctgagggcataatacccgactccccggtggggagtaaaatcacctctggagcacagccgggcagacaccaggcctgcacccccgtcggcactgggggtggtgcctgtggaccatcggcggctttaaattctcttggctgctcccgttccaccatcccctctgacagctaagaacaggctgagggcgggcaacgggagtaggaattgggtgggaacagcgggtggcagcggccgggcagtggcaactacaggtcacacagtcaaccacggttcccttgctcagagcctgtaactactgccatccactgagcttccaagagggcctcagactttacctggggcttcctgaattcacctggttgtctgggaggactagtgtttcttgagagacggtgagaaacatggccctaagccctctgcgtggccccgtgcccactgccgtctccatgctctgaggagcctcagtgactaaacgtggtcccaacctgtaccaggccataccaaagtcctgaacaggtcagtggtgtcaggtgccagcgtggcctggatttcttcctgacagaggaactaaccagcgcacagctccagccactcagaaaggaggcaggtgggaggctgtaaaagaaagtaagggacaggcctggcatggtggctcacgcctataatcccagcactttgggaggccgaggcgggtggatcacgaggtcaggagttcaagaccagcctgaccaacctggtgaaatcccgtctctactaaaaatacaaaaagaaaaaaaaaaaaaaagccagttgtggtggcgggcgcctgtaatcccagctactggggaggctgaggcaggagccaggaggcagaggttgcagtgagctgagatcgcaccactgcactccagcctgggcaacagagtgagactccgtctcaaaaaaaaaaataaaataaaataaaaaataaaaagtaagggatggtgaaaagaagagcatccctcaggcgccagccaagggcaggagcgggcccagggccagcaggtgcccaaggcttcctggcactcgccctcccaggctgccccctggcccccagctcccccggcccccggctctccctggccctctgggctggctcgcagtgtacctgtcctctgcccctctgcaggccaggggagtcgtggagacactgcctcgggctccagcacttcccatcgtttccgcctgggcttttacttttctctttaagaacaagctctaaaatcttaacactcaagattaatacccttaaagagaacccatgccagtcataagaaaactggaccagttcaagacaaagtaggcaaagaccaagcagataatggcatggcccaccgtgcatagaagcatcggccatatcagccctcctgcagtaaacacggactaaaccttggcaccgctctctgcctgtcaacgtggcaaagatcttcttcagaaaagaccaacacaagtggcgggcaccgacctgtggaaacaccagcactggcaccacgctcccttcccagggacttgggaagcatcacacaacctgggaacgtccccattcccaccggcaggggagcagtggacaactcccctgggtagcaagagtcccactacagagtgaggctggttttaatgttaagtacagactatcgctgggtggtaggaggatttgcttttgattttctgggttttttttcctgtattttgtgtctctacaatggacatgtaacaccaagtcccaggtgagcagggatgtgtccttcctcctaaggtccccccacccccgcaggacaaggcacataggacaccagcagggtccaatgggtgctgggaagatgaatggctgctgagcacaacaacctgaggccaggccctgcggagccagaggcaggtgcgggtcagccccaccctcagcaccactcctggactccaccagccagcgctacccactgttacaaaagcatcaacccagagggagctgcggtgacagggaagggtcccgctgtccctgcccgcggttccctctacccaccctgtggggccagaaacccggctcagtaaacctcacctcccatgcacctttccttccctgttggagaccactgggcccatgctgaggtcccgtttgctgagtcagagaatggcacttgggaagccctgtggggtctgtcttgctgagtagccaaggaacccacccagggctggtaagaccactgccagtgcagagagacgtctggtgaaggggcgtgcagtgcctccacagagaagcctgaccaaacacgagaaaggacaaaagcccacaaacagcggcttctgaaaacaccgcggacacagccacacaggagcagcttatctgctcgtagcctgttttatacgatttctgccatttttgctagggccagcttgctgcttggtaagtcccaggcagtgtggctcggtgggttccggggtgtgctccccatacctcccaagacagtccaggccagcactgagtaccgacaccccctcagaccggcgactagggctcaggaactcttcctaaacgaggggctgcctgagcagcctctccctagaggcgtctcccgggccacactgaagccctgtcacagtgacactggactgaatcaagctgaaagcttgggtgaagccacagaacacgttgggccatggcctgcacaggccgacgctcacctgagcgggcaccatgaaagctcagcaatggaaacgcgggctgtccagtgttggctctgcctcggcagccctcggtggtacccggagacagcacctgccccacctgcacaaccccatggcccacagtagtgccgggctgcacgccctgggaggaaaactaaatggcaggaagaggaaggtagcccgtgaggagggccgagccctgcccagaagttagagggagagagaaaaggccttggtctctgaggtgaccagccagggcctcctgaaggaggcaggaggaccagggcctcctagagccctcctccatccagaggcaggctgtccactcttaaccactcccacccccagatccaggtggctccgtgactccctgaccaacagaaggtggctgaaaggatgtattgtcttccagccattttcatgatggctctcctgggatgaaggccgtcccggcagaggcaaagagaggccacgtggggagtcctagagcccaaagtgtggtctgggaccatgaggttagcactgtctttacagtaccacaaaggtgccatgtgccaaagccttgtggaagccacctggcctgtaaaattacagcaggataaacacagaacctgacagatccagctctcgagatttgcaaaaagtaaagccactctatttatttgactctagaagataataggttttttttttaattttaaaaatattacttatgttaagatatactgggtttttaattatttctaaatgaattaaagttgttttacattctcaattttaatttctgaaagatgaatattcatagctccatcatgtaaactcaataaggactttttttttaattttagaggcagggtctcactatcactgagactggagtgcagcggtgcagagctcaccgcagcctcagcctcttgggttcaagcaatcctcccgcctcagcctcccaaacaactggaactagaggcatacaccatcacatctggctaattctttttacttttttgtacagatggggtttccctatgttgctcaggctggtcctgaactcccagtctcaagtgatcctcccaccttggcctcccaaagtgctgggattacaggcagaagccaccatgcccagcctcaacaaggactttaaggggtcctgagagcaagaagtccaaaaactctgctctagggtgaggatataaaactctgcctggagagatccatgtgggggaaactgtggcaccccagcagacacccatgacagcaaggcccctgagggctgccagcccagccaccacgggtggcagtgcaggaataacctgtggggccagagccccacccaccagcccacagatgcgggaaaggtgatgaggcctcatgttaggcccagaagtttcagggttggtcactcagaaacaggtgagcaggaaccacccacggccaagccggaggctgctgagccatgcccaagatcagagacgcacgcgtctggagcagcgcctgacacctgaccctggtggctgaccatgcggcctgcctggcagtcctgggcatgggatgcacacccgcaccctggcccacccaggggcagaagaggggaccacgaagttgtgtgttttctgctgagagcatccaccagagcagagctgctcaggagggcacacggtgctgcaggctgagcatgtcacacgcagagccaaggccgcctgctgggaagcccaccgctggcagggagcacagcctacgcacagaatgatgctctcatggtaatactccccacggaaccctgcaggggttcattttattctatattgtcatcttttttaacattaaaaacttggctaccggtgacactgattatttcttttaacccacaatattcataagatggttgccaaattgtaagagcaatctgacctgccaccgaagcctcctgagcgcagcctgaggtctccttgctgttcctcctgtcctcagactgtcccccatgcccacatgagctcaagggctttgctggcacagctcttcagctcagaggttatccaggtgatacacagccaggctcaccagttcctgctcacagaggcttccctccctgccccttcgtctattcaactgatacgggagctgagtcacatgcgctcctgctggctaaatttgacacagcccattcatcaaaatattattaaagacgacaatcgactgaaaaatattaaataaaaacccacgtgtccctggaaccatgagggggaggaggcaaaggcagcccttctgagacaaagcaccagggagccagggctccctccataggcctgcatggcgagtcccctccctcacctccgcaggtctcagctcaacagcaccttctcaaagaggccttctagagctcctattcaaacagctctcccacgcaccccctccaggcaccccatcccacacctccttactcccgtccccctcggcagtggggaagctgcccaggggtggctcctgttgcctctgttcacgcgtgtccggagcactcagagcaggctgcgcgcatgcaggcctccaacaggaacctgactcaacccagattctcaggcccacactcttgtatttcatgacaccactgctatgacaaatggtcctgtcacatgtggcacaaagaacagggcacgcagcagaagggcagatgtgccgggaggaggaacccagagcggccgcccatgtagagggctggccgcaggctgtggggagaggccagggctgtgcaagacaaactcaacacagacaagccatgctcacgccagcagctttcaacccacgccggagctaattttatgctcctgggctcacgcccaggcctggccccaggctcaggcatctggctcctcagggccacctggcaccatcaggcctttccatgggctgaggacaagtcccagcaaagcaggagttaggagcttccgtagacggtgcaggccaaaccccgagacaacagccccacctgggctcctgagattgcattgctgtggggatagggtctgccagcccacagcctgcacagccaccatgtctggaggggaaaaggcgctgctgaaagggtgcttggaagaaaagtctcccaacccgcaaaggtcacgggcaaaagggaaacagcatggtgcctccatgctttccaaccctccagcttgcctgctttctgcagggaaaagctgcatacctttgtgggagctctttgcctccccgcccaccacagcgaaatgctcgatgacacagaccaaaatcaccaccacgcagggcgaaaaacaggagctgcggcacttaactcactcacattaactaactcacgttagccccgggacatccgcaaacaactgcagggatgaatgaacagacattccagcccagggagccgtgtgcgctggcaaaggagaccttcaaagagaagggagccagggacagcaacgcgactgtggccacagtccacaggccaagcagtgccacagatcacacgtggcctggaagccctgcccaccatctccttcttttctctttaagcttccacattttgtttgttccaattgtttctacttccactgaacaccaatgggtgtgccccagccaggagaaatcctgtgcagaaaaaaacaaacatggtgaaggcaaagaatgggaggctcttctggccaaagacagacgggaacagcacacgcccttcccttccagacaggtctagcactggcaggaggctgcacaagcagtaatcaccacggagaaacaaaggccacggccctgtggctcccaaccagcactaagtggccctaacaaaagttgcagtgggccctggtgtttctaacccagaccgctgtgtggacaaaggagaaacactggggtgacaggggcatggcacaggggtcctccctcacagtggcctcaacacccctcctcccgtaccggatgaccgcagcagagaccacagcttcctctggagagggggtctggtggtacaccaagcccctgctcgatctgacagcagcacttggcaggcagacccctagggtggctggctttcccagggctgggaagaggccctcatgagccaggacacaagggtggcacttggtggtggcaaaggtgggggctgcgctgtctcagatacactcgtgatgagaaacgcagccctgctgtctaccagcccccgaccaggggaggccgtctgcagctcccctggtgggctcacccccagcttcaaggacacttgtgcaagggttcctagtagtcagtccgagcaggagaaatgggaggggtgtcgctaggggtttacggggaggctcattctaaaaagggctccatgtatccacgaccactgcttttttttttttttgagatggagcctcactctgtcacccagactggagtgcagtggcgccatccccacttactgcaacctccacgtcccgggttcaagtgactttcctgcctcagccttccgagcagctgggattacaggcacacgccaccacgaccggctaattttttgtatttttagtagagacggggtttcaccgtgttagccaggatggtctcaacctcctgacctcgtgatccgcccgcctcggcctcccaaactgctgagactacaggcgtgagccactgcacctggccgaccactgctctttttaaggttaatttggaaacgggagggatgatggaaaacttttttttaaagaagaggactctgaatgcaacaccaccctaggcaaacacctctgaaacccaggcctaagagtgccctggtggagccctgatggaaagaggctattcctgaaaccagaccttccagggctgcccgctggagatacagcagacctgggccagccggcttctctgctcacacctccgcatgtgctgctgcttcttcctgggccacctccttcctccttccctcttggaaaagcccttcatacctgctctaaccgagccccctgcttttggccgcactcacccactcctcaattctcctgctgcctggggcccttctctaccagcctgacagctctaggaaagcgggaatggctgtgtctccatctctggacctccgccccagcacagagcctggtacacggcagcccatgaactcaggaatctggggcccccggctgaggaacaggcccagctcactgtcctaaaagtcacagtcacaaaccgcggatcagtggtggaaggagagtggcagatgcacatctccccaggacggaattgcacttggtgatgaagaggacggagctgcagacacacgcaacgccatggatggacgttcgcaacactgcgccgcataggacaggcacacagcccgtgtactgggattccatttgcatgattcagctcacccacacagatggcgggagactggtggccgcctcgaggctggaggtggggatggggagcagtgccagtggacatgaggcttctctggggcatgatagcaaagttctcaaattaaactgtggtgatggttactcagccctgtaattttaccaaaaattatttaattgcaaacttaagttaactttatggtatgtaaattatacctcaatgaggctgttaaaagaactctagagattcaagcaagttcagcctgggtgtcctcataatcagaatcaattgtcaaccaccagtaacatcctcccatgcggcaaagaaaagaaagaagaaaaacaaggtcatcatcactccattcacattcctgcagagacacacactcacgagattttatctcggtcagagaggaggacccctgaaggcagctgggagagccaagttagtaagcacaagctagcagccccaaagaggccctccccactcacctgcagtctgtcttcaatcagagctgagtcagtaagcacaggccagcggccccagagaggccctccccattcacctgcagtctgtattcaatcaccagcactgtggtgccacagcccgagcccgctaacccacagttcacctgctgcttggagagtaaccagggcactggtgtcaaggcaccgtgcggcctcagaaggagccaggagagccccaaggaagggtgcctgagatacgtgcccccttgccctggctgtggccagccagagaaggtgcctggaggagaggggcctttccccacaaactccaccacactgggccctgtgcagggccagcaggagggcggctacattcccatcagtcgggaggggaggaagtgtgtttcctctcctgtattcccagatgctcagctgctcctgggctgtgcgttccgttgggtaacactgactgcacacacacctcttcacaaatgcctgttgtcagttgaagacaagacaaaagtttctcctaaactccaaacagtgtgtggtagagttcctcccttccctagcctccacagaaaccaccgcagctcaagcttctcctctccacctgcctacaactcagtggcgcgggatgacatcctgtcactggctgcccagaatggaacagagcttgtatacaaaaagtggaaaccgctttcaagttacaaattactctttgtaaaaggaagaaagagagaaaaaaaagtttacctttacagctacttcaccagcaaactcaaagcaatgccaagcaaaggaaacctacgagaaagagatggtggagagccatgcctgcaaaccttctccggaaaagccccagccacgctcatcatcaccagtcctgacgtgctgggctctgttccggtttcccgagcaggtttccctgcagggcccccgttcctcaggagcggctaggagtgctgatgataaggctgctagaatgctcagcaggccaggctcttagctcttctcccagtgacaaggaagacatggcttttcacttgcacatccacagaacactcttccggtgatcagaagagaacacggcaggcaaaggcactgtttgctgctactgtcaagtccatactttgtcatctgagatgaactaattcaaagaaatcctttctttaaacaaaaacttttaaaacgtaagagacctgtattccaaactaactacttggctgacagtgagtgctttgaattaattaaaaatatcaagaaatagtcaaaaataacacatttccccaatcccagactgacagctagttgaaggattaatggccaacgaaagcgctggcaatgaccacacaaaagctgctgagataggagcaagcttcttcactcaccgctgacccctctccagtggcagagcctgattaagtgagcagtggaccagaatgagagagacctgtgggtccctgcggctcgctcactcttcagcttttacaacttatttttatagtagatgctcaataaacatgtgaaatgagcagagggaaggagagacagagtagtccctgggccctctctgccctgcatccttgtataccagcttaaaacaggctctggaggaaaagcagtacttgaccactgaaatgtacctcttaaaacaggaagcacagccaggcgcggtggctcacgcctgtaatcctagcacattgggaggccaaggtaggcggatcacctgaggtcaggagtttaagaccagcctggccaacatggtgaaaccccatctctactaaaacacaaaaaaattagccgggtgtggtggcaggcgcctgtaatcccagcgactcaggaggctgagaggggagaatcacttgaacccgggaaacagtgttgcagtgagccagccaagatcgcgctactgcactccagcctgggcagctgagcaagactccgtctcaaaaaaaaaaaaaaaaaaaaaaaaggagggggggaagcatatatttaaggaattgttaaagaattcatgattcacaacgtccaatagatttgaaaccacatatgcaaagataactgcactccatgctaatcccacttgaaaatctcactgccctcttggaactgcccacttttacagccaggcaacggcaaacacctcttccctggccagggccctctgaggcagcagctccaaggtcctcaccagccttcccctggcacccagacccagcctggggcccatgagatgagtgtaccaccatccttccctggaggattacttggttaccaaagtcttaacaagggtcacaagaatctgtcccccaggctggtcgtggtggctcatgcccataatccctgcactttaagaggccaaggcaggtggatcgcttgaggtcaggagtttgagaccagcctggccaatacagtgaaaccccatctctactaaaaacacaaaaattagccgggcatggtggcaggcacctgtaatcccacctacttgggaggctgaggcaggagaatcacttgaacctgggaggttgaggttgcagtgagccaagaccatgacattgcactctagtgtgggcagcaagaatgagacaaaaaaaaaaaaagtggcaactgacagaactgcttgtactgcagctccagctaaacattgttttcaatctggggcacatttaaagctttcatgcactcttgggtctcttgctaattagttaagaacagcacattcagtaagtactggtcagagagggtaggttagctgccccacgtctacttccatttcctttttcttctctttgcttctccccctcttcctcctccttccttctcctctttttacttagtaattgaatgctgagcaatatgaccacaggaaaaactattttatccagcttcccaggtaggcgaggtggccaacgagatgtaaggtgaaattattgcatagcttccaggaaatcctttttgtccttcctgtctaccccagccctgtcccagtctcctgcttcctgaccagaatagacaaaaaaaatgatggctggagctcttgcagccaccttggagcatgaggaagtgatgatggagagcagaaaggcagaaagaacctgggttcctgctgaaactcagaaccctccacgacaatcctgattctcttaccaaggtgcttatgttatttgaaagaaatatgggttaaatcatcgttcttccgaatttctgctacttgaaggaaaagacaatgtctaattgacacatccatcggtgtatcatggtgctggaggtgaaacagcccatcctttactttgaaaagaatgttctcagatcattagatccccaaaatgttgccaaatccctaaatgttcatgggatatatctcttggcaagcacatgtatattttttctctttttctttttttctttttagacagagtcttgctctgttgccaggctggagtacagtggcacaatctcggcttactgcagcctctgcctcctgggctccagggatcctcctgtctcagcctcccacatagctgggattacaggcgtgcaccaccacgcctggctaatttttgtatttttagtagagacagagtttcatcatgttggtcaggctggtctcgaactcctgacctcatgatctgcccacctcggcctcccaaagtactgggattacaggtgtgagccaccgcgcccggccacacgtgtattatttagcctctagagtatctaggtcctcggctccggggcctgtgaacgtggcatcattcatacgatgtgatatcctaagagacaatcaaaatctgtgtggacgaggccgggcgcggtggctgacgcctgtgatcccagcactgggggaggccaaggcgggcggatcttgaggtcaggagtttgagaccagcctgaccaacatggtgaaaccccgtctctactaaaaatacaaaaattagctgggcgtggtggcaggcacctgtgatcccagcactttgggaggctgaggcgggttggagaccagcctgggcaacatggtaaagccccatctctaccaaaaatacaaaaaaaaattagctgggcgtggtagcgtgcacctgtaatcccagctactccgaaggctgaggcaggagaattgcttgaaccctggaggcagagattgcagtgagccgagatggcgccactgcactccagcgtggcgacaagagtgaaactctgtctcaaaaaaaaataaaaaagtcgatgtggatgaaattgtggcagagcgaattcgagtttgcaggaccctgaggcctgagtggggaggtatactgccaatttctccaaataacaacaccctgcttctgatgttctctgtttattgggattgaggtgggtgtggctgcctgatcaatagctgaatcataactgttgattggctccaataaggacaccacgtctggaagaacagctgcagttggaatcattacatctttcaatccactgtcaatcaccaacactctctgtcttccgcacagacaacacgtgggagtgagactggaatcctagaggggccccttctctgcaactttggggtctgggagggtggcacccatttctgggcatctctggagattaaggtttgcttttggttgacagttctggcaggaaggaagacccatagcgtttcccactcagccctctcctccttccattcacccattcatctgacaaataggtagtgagtgccaactacgtacaaggacaaggcacttgtaaggtgcctggagaacagtagtagacacaacagactaaagcctccccttgaggagctgtggagtgtcagtgaaaaaaataataaagcaggcagcgcattcaaaatgaccagtaccctggggtaaacagagccagggagagggtcacggcacactcagtgtcatgggctgacgtgtgtcccctggaaagataagaggcagttctaacccctagtaccagtaaggtctgaaagggaccttatctggaaaaagagtcactgcagacgtcattttttgttgttgttgtttgtttgagatggagttttgctcttgttgcccaggctggagtgcaatggtgcgatctcggctcactgcaacctctgcctcccaggttcaattgattctcctgcctcagcctcctgagtagctgggattacaggtgtccaccaccacgctcggctaatttttatgtttttagtagaaacgatgtttcaccacattggccagattggtctcgattataggcgtgagcccccatgccctgtccacagatgtcatttgttaagatgaggtcctggtggggtgggggcttccaatcctatatgactggtgaccttataaaaaggaggaatttaggctgggtgcggtggctcacgcctgtaatcccagcactttgggaggcagaggcgggtggatcacctgagatcaggagttcgagaccagcctggccaacatggtgaaacgctgtctctactaaaaatacaaaaattagctgggcctggtggtgggcgcctgtaatcccagctactcgggaggctgagacaggagaatcgcttgaacccgagaggcagaggttgtagtgagccaggatcacaccactgcactccagcctgagtgacagagagactgtctcaaaaaaaataaaaagggtcggggggagtttggacacagcctcacgtagagaagacagtgtgaagagacacaggaaggagaaggccatctacaacacaaaccgaggagcgacacctggagcagacccttcctcacagccctcagaagaaaccagccctggtgatgctgacaatgtcagacttctggcctccaggactgagagacagtccatttctgtggattgaagccgcctcgtgacagcccctgccctttctaatcaggctccttccttctgcctggctctagagcagccccaggggctgctgtgcccactgggagttcctggccagagaagtgaggggcttgattttcccaatcatgcttccatctagactggggaccccttacaggcaggacctttgtggagatcctcgggcagctgtcctccactgtggggtggaaagctggggcttccaggataagggtgacctcatggcatgtttcaggggaaagacctgattccccagtcaaccgctgactccaggatgcaggccaagccctgcggggtcattcacggactctgctctgaccctgtctgtccttctctcgggcccactcattgcctttcggggccagcaggggacatagctggtgctcagcgtcccctctctgtcccaggctgcgccgccgagaggccttggcacggggtaggcctcgtgacacacacattctcctacgctgcagagcctggagaacaatggctccctctcacctctgagctggttcttgtgcttgggacagtccccagtgaggctgagggtagccacagctgccagcgcctgcctgggcagcccctccatccccagcacccccatggttcagcattccctgtacctcctagacctgaacagagtctgatttggggatggtggcgcagaagcctgccctgcctcccggtcccaaggtgccgccagctcttccaagccttcaacaaacgcctcagatgccctcctgctgatcgcactgtgcctgctgtcctgctcctgctccctcacttaatccccaggcagtgacaatccagagaggaggctgaggctcctggaggaccagaggcttgtccgaggtcactcagcgagtgggcgggcagctggggttccagaaacatctgctctcaagcccgccattgtcccaccatgacctgcctaccaaagggatgctcctccctgggtcttgaggaaacagtcaaggtggtcacccttgggagcaggctgggcagtgttctccaggcttcagtcatccccgcctcccctccagaggccaggacagcccctgcatttggcttagctctccgtgggggcctggtgcccctggggtgaccggaatgcaggcagggcatgaggatgctgataatcagtgtcacctgggattatggctggggccgtcccatgagccaggtgcagccgaaagctccgtgtgcatgacctgaagcagctgccagtgctctctgagagggtgccctctgcctccctatctccaggtgtggctaagtaaacaggccacggcggcaccacagggaggcaggctgggtgctcctgctcatctctggtggatgctgctacccacatccagggctgtcacctgcccattcacgcacggccctccaggccacttcctcccccaggacctgcaggcggctgcaacaacccccatcaaaggtcccgctagccaggattcactgaggtccagtagagggagggctgcagcctctgctcccagaaagctgccctgtcctggccaggagcagtggctcatgcctgtaatcccagcactttgggaggccgagacaggtgtatcacctgaggtctggagttcaataccagcctagccaacatggtgaaaccctgtttctactgaaaatacaaaaattagccaggcgtagtggcacatgcctgtagtcccagctactcgggaggctgaggcaggagaatcacttgaacctgggaggcagaggttgcagtgagctgagatggtgccactgcactctagcctgggtgacagagcaagactttgtctcatatatatatatacatatatatatatatgtacacatatatatacatatatatgtacacatatatatacatatatatgtacacatatatatacatatatatgtacacatatatatacatatatatatgtacacatatatatacatatatatatgtacacatatatatacatatatatgtacacatatatatacatatatatgtacacatatatacacactctcatacacacacatatatatgtatatatataaaatatgtttattattttatgcgcacacacgtatgtgtgtgtatatatgtgtgtgtgtgtgtatatatatatatttatttgagacagggtatggctctgctgcccaggctggagtgcaacggtaccatcgcagctcactgcagcctcaacctcctgggtacaaacgatcctcctgcattggactctcaaagccttgggattacaggtgtgagccaccgtgccccatctctgagcatatctttctggggcacacaattcaacttgtaacaggtgcagttaccggccacatgattcatagcatatagggtgtgctttacctgaggctgagacggggctcatctcccctgggaatcattcttgtaaggtgccagtgatctgcaaatgcagatgaggcctgaggctggggcacaggccacctgccagctggcaagtgcaggatgggcagagtccttgtccagacctgggcagagagcgctcagggcaggcagcgtccaggctgccgtgggttgctccttgaggccctgacccccagggtcacctgcaggccattccttgaagcaaagaggtgactgacctggggagttgggaacctgccctttgtgtccccaatgagcacccttcctgccacccccacccggccgggatccaccacccttcctggccggtggtgccagcccctaacaaaacaccctttcaggcaaggacctgcaggtttgctccccttgccctggggacagagtctgacatccttgggaactgaccgttccctgccccctccccagctctaggaactacttcatcctgtgcactcggcagggtgcccggccctaggtgggtgtgtggtcggtcaggggctcccgtggctgcagtcatgggctcccctgcactgcggggcttcgaatgtgctgctactgttgggaaggagttgctcctctcaaagaactcctgctcatcacacaaggcctctctcacatgccccttcctccaggcagccttcctgagtggtggcaccttttgtacacacctgtcacagaaaccactgatctcagagtgatgacagaggcttgtttcccaggcacgggggctccgaggggccatccccagcaccagaagggttccacacatgttaatggaaaaaatccacaaaaagcaggaacgggaaagtaagttactgacattccacccctccccaattcccattttgcagacaagaccctgaggccccagagggcccagtgggtgcggcacagtatggaactggcccccacagagctagcctgtgcacaggttccccgtctccctatgggaaggaggaggcaccaggcctgctccagctccctctcctggattgggacactgaggcccattacacaggtggggtactggcaggacagctctgccctccagggtccagtgggagctgctgctgctcccacaagccacgcagtgcctggagccagactgggagaagctgtcctggtgggagcctgtgccctgggacacagagtgcatggtgcacatggccaaagcgtggcctggaggcgtggagggtcaggaagcagtgaaggagcagggcctcggcctcgtggggatgcacccacacagtaactacagatggaggccaggaggctcagccttcctcctggctctgcctctagccagctggggttcactattgtcccctccatccactgggtagggacccctagatttcaggtccccaaatgtacatgtctcatcaacagatgcagcagactccgtagggaaactttggaaatacagattcctgagccctgcccccacagaggctggctatgtaggtccctgggccctgcatttaaagatccccccaggcattgctggagggcaggagggtgggagtccccggaccagatggaccctgacagcctgacagcttttacttatcaaacccatgcgggccccacctcctgggatgctggctctgcaaactcacctctgcggagcccgttcctaggactggttgccagcagtgtggtgagggcagtctgaagggttcccggtggtggtcatagagcctgcacacgcctccttctcccaccgatacctgttatgggtgggattgtgcatcccacattcatatgtcgatgtcctgaccccagtacctcagaatgtgacctcattatttggaactagggtcactgcagaagaacctagttaagatgaggccacactggagtagggtgggtggacggccttgtgaaaggctgcagcgaggggctgaggcagatgctccctcctggccctccacggagcccacctgcctacacctggatcttggactcatggcctccagaccttgtagagacatttcttttctttttctctcccttccttcctttctttcctccctccttccttccttccttccttccttccttccttccttccttccttcctttctttccttctttcttctttttttgttttgttttgagacagaattttgctctgtcacccaggctggagtgcagtgacgccatctcagctcactgcaacctccacctcccgagttcaagggattctccggccttagcctcttgagtagctgggattacaggtgcctgccactacacccggcttatttttgtagttttagtagagactggggtttcaccatgttggccaggctggtgtcttactcctgacctcagatgatccgcctgcctcagcctcccgaagtgctgggattctaggcatgagccaccgcgcagggctggagagacgtttctgttgaagccgcctggtttgcggtgcttggctccagcagcctcaggccacacacaatatcccagggcggcaccctcaatgccaggccctgctgggaagtcaagggccgaggtgaacatgccctctgcacggtaggggattcagagtgccgccctgcacctgggctgggggaggagcgcagagcacaccggcagaccagggaggggcccttccaggaatgcgctttgtagacagctgggtagggctggggcggactaaggggcctgcggggtctggcggaaccatccaggtgagggcgtggtggcgggagagccaagaacagcagctaggtgtactgcttacctgagaagggggggtggccgcgaagggggttggaggcgttgggatgggggcctagtcagacgcaggtggccgctgccatttggcattgcccggtctggaggacagggagaaaacctggctggagacacagctggtcactgactgcctgagtccctggggccgcggtgtgggcgaccttcctgcgggacccgcaagcccagagcaggtgcaggttgtgggtacagctgaggcagccgaaggaccaaggggagggccttagaaggagggtgggctgggggcgcggggtggagacagggctgtgccttcctcccagcaggtgggttcccgacgggtgggcgtgcgtgcagggcccccggcccgagaaccggccccagcctcggcgggcgcgggcagcagatggcgctgccgggctgcgctccgcctcgggttcggggagcgccgggtgggggtggcgggcgagcccaagtcgaagcccgaggcgggagaagagctcatactacgttccccgggccggacaggcgggctccggaggggcgctcgccccgcccatgcgggacaggtgtttgcccacctaggccccggacccggagccgcgctgcccacgtgctcggagcggagcagctgctccccgcgcccgccctccacgccagcagtgcctggggacccggacccgcgaggggcgcgcaggacgcgggagccgaggagcagcggcgctttgcggatggagagcgccgcggagggcagtctgggagtgggcgcggccccgccgggcgtgaggtcatcgcgagcagctggcgcaccccccgcgcctgcctcccggtcctcggagcccccggctgcgccccgcggcgcgcgcaggttgggcaggttctgggctctgggcggcggggcgtggaggagccctggggcgggattgtgactgggcgcttcctgcggggttggcggcccggacgccggtgccacccgagccacccagcgatgctctgggccccctacgtcggggctgacctcaccgcccatcctggcggaccccgcccgctctaatgggaccgcgcccaccctacactggcctgcagccgccgtcctcccggctgcgggttccttgccctcagggagggcggggccgccaccagctgcccggagaggtggggggacccaaacctcccctcgcccacaccaaccccgtcctactgccctcaatcctgcccctcctggagtttcttgttacggtccacacaggcgaagggccccatcggccgcgccttgccagccctaatgccctccgagaggcggaggccccacagtaggaacccggactgaagtcactccctggcgctgctaggggctcagggtggagggctcaagggtgtccgggaagggccttcgcccttcagcctcaaagcccccccagtcctctggttttctgttcctcttttgggcccccagcttgtgagcgcccgctgggtaggtgggcaagaggtgaccgagcagaaccaggcaccgggaccgtccggtttgggtctggcttccacactggctgcagtgcgccctgccccaggccggcaaagtctctgagccccattcctgccgctggccgaaggattgggttgggcgaggaagatatggaaactgccccacaagcccccctcccacccccaggacgccgcccccaccggctaggctctgggcaggcctagtgtccactgatctcgccaatcggccctgtgttccagggctgtcgggggtctcctgggccaggggcttgacggagggagtggggtggggagggtggagaggcaccggaatctctttctgcttgggagtgggggcgggcggatatcaggaggggccactgccccgcagatgacccagagccgaagaccgcgggctgtggccagcgcaggctccacgcgccccgaccctcgcggcagggaggccccgcccactgttgggcaggttcttgacttcaccctgcttccccaaacgtttccgggtgcaaacgcccctctgggctggggtgggatgagggaggggagccctagaatggagttttgttttcctcctctggcatcaggtgctcaagcccaagctcctccctccacccgcctctggcccttccctggcttctatttccagctctccttggctatttatagctgcgaccggccggcaattgcgtcagtcaggggcaggcttcggccggcgatgccaacggtgccaccagtccccctacattcccctacccttcctgggtagtcacctgccctgcgctgtcctggtcggaggccccaggtgtgtggggggcgggagtgcgttctgcaggtgcgctcagccatgagggcgcatgtgctggggcagagtgggagggcactggacttggtggggggggggggcagcagaattcctggcggggaaggggtaagcggcgtcttcccctttccttcccagagcttcctcctgggagctgcctggggacaggccactgttccttggtttcatgggtggtgtctgcaaagactgggagagatgcccctggacctagcacccgtccccctccccccgcccaccttccagaatgaaggcccttcactgagttcctctcctctcaccccactactgaggcctccctctccccagcattctcactcaactccagttcagctcccataccccttccctccctgaggccacccccaacccagcccctctggagggggacattgaagggttctgaagcaagacaagtctacctgctcagtttggaaggactgaagggcatccacccaggcacttgcctagtgtttggcaaaggcctgccctggcatcgccctgcttgggggtgggaggcacacgcatgttcccctcgccccaccaggatcccctctgagctctggtccccacagtcagggaccactcgcttcacaaacaagccatcatcacgccttcagggcctagtgtcttccacagaggctcctaccccaggagacccattcccaggggcaggagtggggcctgggactgtgggctgccttacaggtctagaccctcacccctgggccagaaggctgtgctttctctggagggactgtgccgccgagccccagctgcctgcagggataattgagtttccccacgtgctcccaccatggacacaaggcatttgttgtgaagctctgctgagaatcagcccctcctctcccaccctctgtccagggcccgccctgccctgtgccctgcgcccttccggggaggttggggcaccctctgctggtgtccattgtataggcccctcaaagactccatggcttccccttaacagcaagtcctcccttcatcttgcccacaaagaaccactcttcttagacactcccccaacccacctgccattcagagccccatcgagatgcaccctcttcccgtcgggccttgccttggccagaggccttcagcttctgcctggctccccgcagggcgctcctacctctgccttttctcccatgctgtggacctttgcaatgtcctcctgccccacctgcccccagcccctccaaacacaacctggccttcagaggccaaaactctcctcctgaaaggcttcctgagaactggccctctgccctttctcctgctcagtctcttcagttctgagctccggaagggccttggtaagtccatccacaggagtacagtggcagctggcaggggtgccactgagaccagcctccagcttacttccagggatggctcggcaggcagaggaatggtgcctgagagaccaggaaccaagcccagccccaacttggcccctgaccctctaagggacattgaccaagcctgttcctctccctgggccttggagagggtctctcctgtgatgtcccactccaagacagttagtatgtggcttattcattggacattcactgggtaccttctgtatgcaaagaccaggtacccatctgcagtccaatggagaatggaggtaagcacaagctggctttaatgtaagactaacagaagtgcaactaacgcaatgtaacattattacccacccaccttcgctccctccctccctctcatttacccattcttccacctcctatccaccccatcacttctccacccgtccatccatctgtccaccttcctttccttctactccctagccacacatctacttgcctatttatgaatacccatttatgtattcatccatccatccatcctattcattcctccacccattcatccatgtacccacccaccccactcatccctctacccattcatccatctgcccatccatccatccacccacccaccccactcatccctctacccattcatccatttgctcatccatccatccatccacccacccatccaccccactcatccctctacccattcatccatctgcccacgtatccatccatccacccacccaccccactcatccctctacccattcatccatctgcccatccatccatccatccatccacccaccccactcatccctctacccattcatccatctgcccatccatccatccacccacccaccccactcatccctctacccattcatccatttgctcatccatccatccatccacccacccatccaccccactcatccctctacccattcatccatctgcccatccatccatccatccacccacccaccccactcatccctctacccattcatccatctgcccatccatccatccatccatccacccacccatccaccccactcatccatctacccattcatccatctgcccatccatccatccatccacccacccatccaccccactcatccctctacccattcatccatctgcccatccatccatccatccatccacccaccccattcatccctctacccattcatccatctgcccatccatccatccacccacccgcccaccccactcatccctctacccattcattcatctgcccatccatccatccatccacccacccaccccactcatccctctacccattcgtccatctgcccatccatccatccatccacccacccatccaccccactcatccctctacccattcatcatctgcctatccatccatccaaccacccaccccactcatccctctacccattcatccatttgctcatccatccatccacccacccaccccactcatccctctacccattcatccatctgcccatccatccatccacccacccaccccactcatccctctacccattcatccatctgcccatccatccatccatccacccacccatccaccccactcatccctctacccattcatccatctgcccatccatccatccatccacccaccccattcatccctctacccattcatccatctgcccatccatccatccgtccacccacctgcccaccccactcatccctctacccattcattcatctgcccatccatccatccatccacccacccaccccactcatccctctacccattcatccatctgcccatccatccatccacccgcccaccccactcatccctctacccattcatccatttgcccatccatccatccatccatccatccaccccactcatccctctccacccattcatccatctgcccctctatccatccatccacccatcccatttatccctccacctattgatccatccacccatccaccccactcatccctctacccattcatccatctgcccacccatccacccattcattgatccatccatccatccatctacccacccacccaccccacgcatccctctacccattcatccatctgcccttctacccacccatccatgcacccatccatccatccaccattcatccatctgcccatccataaattcacctatccatccatccatgtctccctccctcatccacccatctacccacccatccaagacccatccagcaactaaagctcttgtcctggggggagacacagctgtaggcagggcaacaagcctttaggggactctacgtagcagttggaggccagtccaccagtgttcaactcttgcttcaccgcctactttgggcagctcttggaccactaggagcctgattgagttggtaaatgagaccccctccttccatctggagtcttacactgcccccagggtcctgagacctatgtgccccagatgggcatcctaggagaggccgtcacccacctgctggagctgcaggtgctcctgcgcacagggggtaagggagcacctcggtgctgcttgagtcagccatcagctctttccaggcctcagttttattgactgctgggggctgcctgagttataaatagatgttcttgagccaaaaatagccttgcgggagcatcagactatgtttctagctttcctcctttttgaggactcttaaagatgcaggattcaaggaccctacctcctcctgcagcccccgaggagggactggccccctcctcttcccctctcttgcttcctcttcctcctgtctcatgagcactcacacacacggtctggacagcatcactggttgggaggggtccctgggagaggtatactaaacctggaagaagctgcatgaaccaggtctgtgtggtaaggacagatctggtatcctccgccacagtgtagacaagcctcagcccgggctgcacgcacactgtgaatctttgcagcctgtggcacctgcagcagccaggtctgccctcggtggggggtgggggggggggaggcggggctctgcaggccgggctggggctgcctccagggagaggaccctggaggctggggacaagcctgggggagacaaaccagtactttctaccacataccctggtgtgcttttaatccttgtatgacatgcacattacttaagatttgaaaagctggttggaggccaggcacggtggctcacacctgtaatcccagcactttgggaggccaaagcaagcggatcacttgaggtcagtgagattgagaccagcctggccaacatggtgcaaccccatctctactaaaaatacaaaaattagccaagtgtgatggcacgtgcctgtaatcccagctacttgggaatctgaggcatgagaattgtttgaaccggggaggcggaggttgcagtgagcggagatcgcaccattgcactccagcctagatgacagaacgaaactccatttcaaaaaaaaaaaaaaaaaaagtctggttggagacactatatatagctagacccctatttctgctggtacgtatatgcacccacacacatgcacacagcacacagcacacatggaggggctgggagggaagcatccaactgttcacattgggattgtgggagtgaggggactggtgggtaacactgaggttttatatcgttttaagttatttaagcttttactagcctgtaacaactgaaaaagtgtgttttacaccctaaaggtgcagctgaggacctgtgcccatgcctggcccccagggactattctcagagctcacccgcggtgtgagcctggggcaagtttccagacccaacacaccaggctctggcctcaggcctgcctcccagcagcctctgcccccaccctgcccaccaccagtctgaaggaagaggcgcggagtcgtggggaaaacatccactttaagctttattacaacacattgtctccaaatacaaagggaggggccgggagcagaaggtgcggctgtggcgggaggggctccaaggggggctgaagggccggcagcccagtctacagagactggaggctcagcgggggacctgcaccctctcctccgctggacttcccagcaaataacaggaggggccgggtccattttggggcgatcccaatgccaggcagtggccaggtgggaggggccggagagaggcttggagaggactcagggctgggtcaggtgaaagccaccaggtggggccctggcccgcctcccgcagcactggaggaggcagtggccaggtgggaggggccggagagaggcttggagaggactcagggctgggtcaggtgaaagccaccaggtggggcctcagcccgcctcctgcagcactggaggaggcagtggccaacacaggaccttcgcccccctgctggctgctcactttgcggtaaccagtgcctcaagagtgggagcagagacagactgagacagacagcccccctcaacggcctgcagaagggacaaggggaagggggaagggagaagggggcccaaccagtggccccagaccactgtctcccggacagcacaggggtggggggcgagaagcgggaagccagtgcatcctcctcacccagggtctcctcagaaacccaacgcaacagacatatgggaggcaaatttacataattaataataattaaccaataataataaatacttaaacctctaatccatagattgcaaatacaacgatagcttattttcttgggggaacaggagtgggtggggacagagggaacgggaacaggacttttgctgaaaggagggatgacaggaacacagagctgtgggtgaaaagaagaacaaatagaagaaacagcagagagggcggctggctggggcgggatgggcgcctccctggccctgctccaggactcaggactgggtcctgccctgggctgcctctccggccaagcccctggcctcttcccacagtgactggccccactcctagaccctaggacatctgaagggcaggggtcccaatggcccgagggggtatggggcaggggcagcaggctgacccacctgggcccaaaagccacttgtgtttgggggctggcatgccacctagagagagagcaccctgggaaaggggtgaatgggagtttctctcctgagcggccccatgggggtgggggcaaacgagggggctttacctgtcttgaggcagtgctccctaagtgaagcaggcctatcccagcagcacaggggcttggctggcgcctgaactccctgtgtgagcagcacctgctcacagagcccctcagcctgcaggtgcacacctgaattccaagttctgcctggggcatggctgggaggggggcggggcagacctggaacagaaccctaagaccaccccctcctcatacctgggggtccagggcttcctgcccagtggagccagcactggctagccaggcgcctcctgcctgacccccggaggccaagctcctctcctgcaatggtgccaccctgcccggcaggcagctctgggggcatgggcaagggagaagggagggccgcagccctctaggaatggcctttctgagccactctgtggctggactggggctctggcaggagttgggggcactaacacctctgtcctcccctgggctgcacctcatctgacgttccagaaccccctgcccgaagcccctacacacactgttctatttctcagcccctctgaacaccctggcaccatgaagcccaatgcctgtcctcccctgccagagaacagctctggggcaacgggcagcggggtgccctccttgccaccaagatttggtgcctggagctgatggagggctggccgcacctctccggggcacaccagctcctgctcctccatcctatggctttggtgcagagccctaggccggcgcagagaagggagggagcaggggaggtgggtggggggagaaggggggttctgcggctcagtttgtggcaaagaagtttttttttcctttttttcacctttttgttatgtaaaaagtgcacgaaagctcggcagcctttgcaaaggtcagcagtgtttcctggggcgggggaactgggaggggccccaggcctggcacccagcttgcgactgaaggtggcctcgtattgcttagaaacgtatgtttcagtttaaataccagacagtaaaaatagagctcgaggaccacccgcactgttgccaaatcattgccagaatgaacagcttaaataaataaaaaatcgaaatatttacttctcgataaaaatcccagtaaaaccatttacctttctttgcattatatataatatacatttataacgggcctggctgcgggcggcggggccgagggcagcggaggggtcaggacacctcgatgacctccacgctgcccgagaagctcgcctgcttgcccagggcggccagctcctcgccgcgcgcgcgcccctccaccatgccctcctcgaactccatctggcagctgcggcgcttgaactgcgtctccggggccggctcctcgggccagccggtccgcgcgtcccggggctcagccctcgctgcctcccgccgccgcaggtcgctgccgccgcctggtcccggggcgcccgcccggccgaagggcgcaaacagcaccccgcccgccccctgtgcgccctcggggctgaagcaccagggcccgtcgggcgacggcgtgcctggggagtcgagcggcggtgcccaggccccggggccggccggctggccagggccgggcagcccgggcgccgacagggccgagaggccgtgccgcggagtctgccgggccgcatcgccgaagttcaggccgaggctgtgcgcgggggagcgcgcgggggagccggcggggggccggggccgccggcggggccgtgggcgcgcctcaggcgcggcgtccgggctgtccgggctgggcgaggacaggcccagcgcggcccccgacgggctgtccagcttgcagagcttcggggcctcgccggggtcggggggcccggggccgtcgggccgcctgctaggggcgtaggcagacttgatgtccagggagaaggagcgcttgaggcggttagtgtcctgcaggcggtccgaggagaggtgcaggccgcgcaggccctgctgcagtgcgctggtcgccgggggcgtggggggcgcggggggctccccgcccgcgctcaggccgccctccctggcagccgcattccctgtggcagcgctctctgaggtaggtggtggcagccgtggcagcggggccccggcggcaggactgggcggaggctccggcgtccctgagggggtgcccgggtcgccctgcagggcggccagcagcttcaggctgcgctcgtactccagcagctggcccaggaagttgaagttgggcgagatggacgggcgcctgtccttcacgaacctgcgggggaggaggctcagtcccaggcgcccgccggggccaggctgcccacctgacgcacccgctgggcacccacgagctcatgtgcgccaggctggtctcaggccctcctcccttgccacgggtcctggacggtggggtcattctggtgcaagtgggcagccgggggaagggaagcgacgctgtgagccacaagtgcgcgactggggaaggtggtacctgtaggcgtcgtcggaggacatgcccatggtcttcatgatgtaggcgatggcgatggtggcagagcgggagatgccagccagacagtggacgatgacttggcagctggagagcttggctttatctgggcaggtgggccatgggggccaggtgagggctaagactgcacagcttctccctggcccaggtaggggaccccacccgcccaactgccaacagttccggctacttcctggggacccctcctgtgtctgtggccacacacagctctagccttcctctagccaggtccctgccctccgcccaccgcagactcaccgatgaactcgatggacttgtccagccagggcagcagtttttcacagtagttgtcgttgatggggacccgcatgaagcggctctcgcagatgaagtcaggcttggggcaggagttgctggcgttgaggacgtagcttattccattttgcgtcatcagatcctggaggggcgggagggcgggttggaaaggggtgggagaagctcggggcgggagtgaaggtggaggcttttcctgccctgccgtcaggagggcctttagaatcctgggagccttggaatttgtcccagatcccagtgtatccaggggagggcccaggaggcctctctggtccaccctggcaccctgggcccgtgcggggggtggggcacggctggcctccgactgcaggccccacccacggctggtggtgggctcctaggaattttatgattgcctgggtggtggcttttacccttttccctcgtcaccatttttaaaacatgggattctttcagagctggccagaggcccagtgacatccgcagcttggcatgccagctccccgctcctcccccgagccctgccgggccctcccgcaagccctgctgtggtccttccaggggcatgggtggggagcctggggtcctcctgggcccccacccatgcttctcccacacccagctcatccactgccttcagctcctttcctccctcatcccccgctccgctgccaagctgcttctggagctcctgcccctttcccattgaccaccccccgaactccactgcacacacaccttgtttaggacgtccttctgcgagcccaggtagaggtgaggcaggatgcgggtcaggcccacgctgggcacaggcaggcagggctgggagaggctcatgggtagcagggcagcaggcttgccctcgcagaggccggggaagcaggaggagaaggtggcgaagccccctgtaggaggagggccgtcaagtgggttgagagaacacctagggctccctgtccgcctagggtgccctgtccgcctagggcaccccatctactgctgaggatcagtcacacccagcccagacccgagcctgagcccagccggcaagcctctggcggagcacctgctctgcccgcggtggggggagggggtactgccacacatttacagcctgcacctacgcccacattcctcctcatgctaattaggggctgacccagctgaggacgccgctaggatgcccgtaaaggtggcgttgaggtggctggccatcacggcacgcgctgggcccaggcaggggtgggctcagaggccacaggggtctcctgctgagggtgtgtgtcacacagcccagaggagaggccctcacgagcccggccatctcccatacccatggcctggggccaggctgggccttcctcctcccctgcactgatgcaatgcctccctgcctccagctggctgggagccccaggcctgggcttgggtgccaggaccaggaggccagggcttccgagaggccctccccgtccccaggcatgacatcaccctggcacagccctcggggcatttgctgtctggttatggctgtactccacccagcaggggaggacggagagtggagaagcccggggcactgggggcacgcagagcaggcagtgggcacccgctgcacacgtgaccagcgtgtgctgctgccttccacacacgtccaagtccgaggccacaggctggtgggaggaagtcccctgccctgcaccagctggaaggacccgaacgtgaatccctggatgtctgactcagtgaccatgggtagtgcacaccatggctctggtctcagcttcctcctcctgcctgccacacagcatcatgtggttccaagaagataatgagcacgaagacacatggtgagaatggacctggccgtccctgacctggctggggcgaccaccgatgtggaccagaaactgggcagcacccacctggtggctgccagctcttgggagggtgaagccagcatggcccagcaccaccccgaggacaccttccagaacataagcccccatggcaagccggctcctgcttgtgcagagcctgaggcagctgggctgaggcctgccctatcccattggacggggcaggggagtgacggcgggagctcagggcctgggaaccccagggctcttttttgtcctggtttgcagaagaggctggtgccacatgtgtagcaggtgcccactgcctgccccgcgtgcccccagtgcctagggctcctcctctctccattctcccctgctgggtggagtagagccaccctggataactcctgaggacaggggagtgtgtgcaaacccccaaccagaacacctgctgtgccagctccccgtgtccctaaaaagggcgtgacgctgggggactgtggagataggggaagctccaggctgggtgggttgaggcagcagccttggaggaacagtctcttctgtgggaacctgctgactggacaggggaaagcaggtaggtgacttgtcaccaacgacgccccagcttgcaggttcccctgagcagaggctgggatgggcactgtagctggcttccactcactgttctgagctggggtagccctggatgttcccgctgcaggacagccccggggaggcggaagggctgcaccacttctctgcagactcttctgccacctgctgcctctcctcctccctgtggctctcccagggattttgtgccttactctctgctttctccagggcctggccaaaggaggaggtgctggggattccatcagtaccctcccacctctcccagaggaggtaaaggcaggaaagtctctggacaggtgcagagaaccgacagctatgtcagcaattccccaggaagcttcccaggacctccccaggcggagcaggtagtgtggatgtccctacacaccccactgtggatgccaggcctagcagggaccgaggctccagggatttcagaaccacccaggctctgggggtgagtgataagtgaggggtgttggggttcagtggaccctttgtaggtcccagcactctttgggccctggggaggcacccctacccccaggcatctccaaaggcgccttcccagtatccctgctccctgactcgggggtttctggggcagcgcctgcagttcacctgttactcacagtgaaatcccagacttgaaaaaaggcgtgtgtaccaggacatgtgcctgccccatgccacctgggagaccctgcaagcgcttatggccacagtcacagacgcacttctgcccgccacctccatgacccctggactccccgccagggcgggggccgccaccccacccacttgcagtgcagtcgcccggccaagggtccaaggccgactgcgggccgctgcttaaagggccaggcccctctctcatcccttgccgcttgccccccaacatcgtgagcagcgcagctggagtgggggaagaggagcggcagggggaggtgggcttcacagcagtcctgggaccccagcacagcctgtcctgccactgtttctctcccgcttcccgcaaacctgccctgctgtggggaggacagaggcttggtcctcacattccggcctctactgtccctgcaaatggaccaaggagctgtgttgcctgtgccgcgggatcctggaacatcccttctcctgggtgaggggcagcacccctgccccccccaatatattctttcccactctccctggttcttcgcagagccagcccagagcaggggctgtgcccaccacagggtgggagggagcctgagggcagagcccgtgggcctgcctgggtgtcgccatgagcccactgtataccacggggcctgggactccttggcagctgcacttctggagaaaaggggacacagcctcaaccttgcagggcagatgtcagcacagaaaggcagttctgagggtggcatgaccaggccctgggagtgccctcctggcaaatcctagcacaggcccggcccctcccatgcccatactcatccacgcccacctgcacacccatgctgtcccacccaccagtgctgggtgagggccccagccccccaaaccgtcccactctggcctcgagggagacaggcccttccaggcttgggactttcctgggatctgcctgcaggtagggaggtgccactctgggacctttctcagcctccaagaagagtctcctgactcccattcctggctagggcagcaaactggcctttgggaggggtcctgttacacctggtgagctgtaaaaagccccaaactactctctccccgccccccaccagttcagtcctcaaactggacctaggggaacagggttggatcagagtgcgtcattctgtggcttctggttctgagagttcacacatatgcacacaaatcccaaatctcacccagacaagcacaggcgggtacatacacaaatatacctccatgtatatacatgcatatacacgtgcacacacgtacatgcacatatgcgcacacacaggcatgcatatgcccatacatgcacacatgtacatgcacacacatacatgcatgcacatgcacacacacacatacatgcacacacatgctcacgtacacactcgcagaggcagatgctggtcaccagacgcccagagccatgcacagacgcacagacaccctctgaccatggccacccagcagtgcagggtgctggtctcacccacagagaggtggggagggagcctggcctcaatgctcttgcccaggacactggaccaccctcaagcctcccaggtgccctttaggtcccaggacatgccatgtcgggaggtcggcctggccaaagcggctgccaccccttcatcccccacagtcgccctcaggctgggtgaaggtccctgcttccactggatgcagggccaagggcctggcttggctgcctactcctcaccccaccgtgcctgcaccccacagtcccccatatcctctgcttgcctggaacagcccctggtagcagaggccaggcagaaggagcctggacaaagaccccagacctggatgggggagggtgcacatccctgggacaggccagctccgtccggctctgggacctgggccgaccccaggaggtggattctacagacacgccctcagccacagcccaaggaaagaaagaaccctctgggaccacgagtgtgtgagtgtatatgagtgtgtatcagcgtgtgtaggggggcggcttccctgcctccagggcttggggccagttgcccaggctgcttttgggccacagggatccctgggggctgtctgctgggacccaggcagcagccttggtgccaggctgttgccaggcaacctgcactcagctgggctttcggaggtggggggacttcctcgggaccccacggctccaactgagtttccagaggatggggcctctgcctccggcttctgacaggagctccgggagtgggaggggctcccagcctgcatgccttgccctacacctctggagcccagctgtactgtgaggtttccttctgtgttgaggatagtcatattggtgggtcctgaagtgtgggcgtcctggggagaggatggtggggcctcaagaaccacagatgtatggagatccccccgtgcccagcggacacctccctgatgccccagccccagccccagccccactgctggcggagcaagtgcctcggggaggcgtgggtcatggactcaccagtgaggatggccacgctgtcgaagcagccgtccagcttgctcagcaggatggagaggaagctgtctgcggccagcacgctggcgtcccgcgtgctctggtcatagaccaccacgtcctgtggctccgtagcctccacctgggggccatggggcagagatcagcatgccgcctccacctatcgatgccctggccccgtcccagatatgctggctcaagggaatagtaagggcatcagatgatgggaggcaggcagctgtcaccttgctgcctggaggggagggcaggtgcagtcacacactctcctccatctgccagaggcccagatgcacacacccacaccacacagcaagccatgggggcagggaggggtggactcctgccctgcgcagctgtgcccccatgccatgcacatgggtgaaggggacggacgctctgggccaggcctgtgtggaggagacacaggtgagtgcgatgggagcccaggataggacctggctggctcccagggtggcggagggacagagaagctcggccctgaaacgcatgccttcgggtgtgggctctcagtggggctaactgtgtagccagcaattctgctccccaccctatcccctccccaacccccagcggagaaacagagggctgcagcaggaccccaggcccctgcaccaattccggaggcagcagctggaagctgggttcctcctgccctcctcccccaccccaagggccagcccagatgttgagcggcttttgctcagacagcaccggtgcccccgccctgcaagcacacactcagcccttaagccagctgagccgccaaccctgggctgggtgacgtcaccggcagccaatgggatcgcactctgccgggagtccttgctgggggtcattaatcaccagattccccttgttggaaaccaaagggagccgattctggccttggggtgggcggactcctggccagtggccatcccacttgagtcctcccatgtcccagctctgaacagggcctatcagtgacccagacccctctcaaagcctccagggccaagagcttgtcacccttgtcccctgcgaggcagtagaaggaggaggtgccgccaccttcacaggtcaacagccccgctggtccctccccagctgcacctgatggtcctgggcagaatgagctgtccttccccagaaggacattcctggggggccacagagagaattctgggtccctgaatactctgcgggctgggggaagctgtgggacggggacatggactgctcacgtgtgccttttgaccacccctcctgtcctcacagcagtggaagtggaccacacagctgtccctgtcccgtgtaggccagctgggctgctcccactgccatgtggtcacaccttgctattccactcactgctcccctctgtgagcctgggttggccctggccacacagtcctatctgcgtggggagggcccggcacctctgtgcagaagctgagcaaggaggccctggagggagggtagggaagggtgctgcgggcgggggtgcgggggatgccctgagcaggggcaacaggcagcggtgagaggcaagtgccagggaggactgctccacacgcccctggctgtgaccccaaggagtcgagtttggactggaaggcagaggaggggggtgctgcccgagctgagggccccttagctgtggaccctggacgtgatgcatgcctggtgggcagtgggctgggtacctggctgcgtgcagccggctggatgagctccgcaatggtcaccttgccctgctgcagccgccgcttcaccagcttggagcagcagatgttgacggagctgagcacatgccagctgttgtactccacgaaggagcggctgtcgatgaccagcggccccccaggcccgccccgcagcaggctggccagcttcttggcatccatcaccttcctcgggagccggtccccagccatggtggggcaatgggtgctggggagggtgacccctgaagtgaggaggggctgctccgacggcccaggtgtggcctcgcgctgggagtgacctagcacatggtgctggacctgcagggacagggggatggtcagcagtgctgcgggcccctgggtggcacccagaagctccccaggacagatcagagctgggagctgcgcccaccaggacacaccaacatgtgcccgtgggaacccttctccctctggagagaccccgtccaggtcacaaggccagctctcagcaggatgcaacaaggcagaggggggcaaatgggccccacagagaagggtctgagggctggaagaggccaggggtccttcctgtgggccctggggttcacggacccttaggcattccagaacattccatctcatccctgggacacaggcatctccctgctgtgacttctgcatcttttccaccacaggacccccagcaagtcggggtctggactgcacctcaccctcccacatggtcaagctctctgccctcctccgggcttgctgtcctcacacctgcccctctctccctagcacagccccagggagtccaatccctggagacttgactccagggcagctccgtaagccgataatccagcccctggtggatggtggccttggggctgcctccactggagagtgggctcccgggggcagccggatagcaggcgggtgcgggaggggctcaggcacagaggcacggctcctttgccactgctgccctcctgacctgcaggctgaggtttagtgtgcgccacgtgcctgctgggggtgagtgcccagctcctgcaggggcgtgttgcacccacacagtgcctctcccctagcggagcctggggtctaggaggctccttcatgggctgatagggcccaggatgggaggggcggggcagccctgggaggagggtcagtgtcggggaccccgcaggtgccaggccctcggcatggcctgcaaaggcctcagactgccgggtgggcaggtggagtagggatgtctgaggatggagtctccggaagcccctcctgcaggcttgatgacaagcctgtcactgccccactgccgggccccatctccctgtcacctgccaggactggccttcctctgggtccactttacactcacagcccctaggaggcgcatagtgttaaggatgatgagtttgctttaactatggggaaaccgaggcttggggcagggttgggacctgggtcacacctgggtcacacacagatgggcactgggtgtccctgcaatgccatcttccctgtgcccccacagctgccaggcagtcaggaagtttactccacccagctcaggactgagggaaggctgggagatagatgtaccctgggccctgcgccctgtgcaaagcgggctacggtgggtagcgggccctcagcaagccagacccccaacccacagccacaggaggcactggggggaggcgccctgaggacacccatgcactgcaaacagcaggctggggacagaggccaccaccgtttctggactctccaggtcagctcccaggccggcgggggccagtgagagagttcacagagcagcaggtgcaaggctggtgtggacctcgtccctggcccagccccaactccacactgaggggcaggtcccagctcctccctgcccaggagccccagcctcgcactcactctccttctccagacacttcaagcttggcccctgcctggcccctcccgcctcgactgggcccaggcttctgtgcattcccaccatccctcctgttgccagaggccagggaaacacctgactgtggatgggcagcctcagctgaccccacggctgacaccagggattgcagtggcacctggtcagcagggcctcaggatcccactcagataacgttcctgggctggtgctccagcctccaccacagggtggggaacgaggcctgggagtcctctccagggccagacccagcaagttcaacagcaaaagggcctgctgcctgcctgctgtggagggtctctgcctgccaagggggtccctgactacccacagggggtccttgatgagctgtttgtccttcccgagttctacctgagccttgcacaggtggtgagaggcgagggcccagatgtgtggttctggtgagacagcggctccaggtgccccgtaggatacccaagggtccagctcagagacccagaaccccgagaaggctgcagtggcagggacacttgggctgggggtcttttgaggagctgccccggcctcaatgtcctcatccgttaagtgggggtggattctctctcactgaaaacaacagaagcaaataccccccagtgcagggaggagggcaggtgtgaggagaggccctcgccctctctgcagccagggcctagccttcatgcagccctgagtcctgacactgccatgagagacctcggtgcagccagccagatctgagacccagagggaggggagggaggagggcaagtccagctgcagggtggtgggcaggggctggaggggcgggaggacgggtcctggcctttacctggccctgctctgcctcctaagcaacgctgagctggagctgggcctatcacccacaatagtattgttatttgcagccgaaggggattcattagcaagttagcacctccatcgtcaccatggcaacagcagaggtgccaggcaaccgctgctcctgcggcagccaccaccatggagcaggctcctctgcagagtgggcacgcgcccctccctgctctctcctacccaccccagcaggtgcccggcagtgcagagcccagtcctcagcccctccgctcctctgccctacctggtcctaaccttccttcccactccaggtacctgctgtgcccagcatgctccctgcagctcgccggctccccgccccctcagaggccttctctgtactgcgaagggctggccgagtgccccctcctgcaggaagcctctgtgccatgctggcctctgggagagcatcctcacccacagggtctccctggacctacagctcccagggggacatgttcctcacctctgtctccccagatgctaaggatcggggctcagctatgccagggatggggcaggttgggtggggtggggagcagagacactaaggacagtctggtgcagatcagtggggccagcactggccatgtgggaacagaggtaaggaaatgtggatggtgttggttccatgcctctcctttcacggccccacatgccaagccctcctgagtacctgtggccctgctattccagtgcctaggggttggggggtgagaggcagggctggggacaggatgccccctagcacagccccatacacccttttcaaaagtctttgagcccaggaggaagcagtttccaagtccaaagtcagaagaaggctcctcccaggcccacaccttccaggaggcaccaggccgccaccctcccctgggacacagcacgcctggctccagtgctgcgtgcacactgccctctgtgcgtgccagaacacacctctttgcacacccactccacacacagggctggtgctccttacccacaatccacctgccctgtgtgcaagtacccacgcgtgaatatgtgcacacgcgtgggctggacatacactagagtacacgcacgtccttgccctctgtatgcaggatcccctgagaaccccaggactccagtacccgaggggtcagcttcagactccttacaaacacgagctcccacacccagcgtctctgtgcagcacattcctgtccctgagcacagacgggaccagggagtcccaggccacccccagctctcaactgacagcatccttaccatgttaccttctgctcagcacctagaaatggggactcactaccttcagagacagctgccaggactgtcaagcatggggggatgggactgtgtctccccctcacacctaggcaggctcttggagctgtccggctcactgttacccagggatgcttctggaggcagaaatcgtcacactaaggaggctgaggagagactggtgggtggcaactctgggaggcagggaccctgcactcacacaggtcagctcatcttccctcactgggctcccccagatgccctcatccctgcctcccctcagctcccttggctagtgctgtaggacccaagctggcctacactctgctccgctggcctggggaagctgtggacctgggagaaagtggggtggggcggggggctccctccgatcccaggaacggggtccgggcagggcaggggatgggaggacttggcacaaggggccgtgacagtcgagtctcagagccggacatatccaggttccctcccttcccaccagacctgtgtccctcctcctggtcactgtgccacatgctaaacatcaggaccagtgtggcgcttccaaggttcactgccctgagcaactccggcagagggggcctcagcgggtgcagttctcatggccagagtccaaccacctctctctcactgtgggtctgcccctttccctgccttctgcaagaagtgacacctaggtctccccaggccctagctgatgccccttcgaggcacctgtccagtggcagcctctaggccctgacttcagccccagcctgagaagagaagggtcctggagcagagactgactctaagcgtctttctgcacctctgttaatgggactttattcccagaagcctccccgaggacagaggataccaggggaatagaacctgcccagccacactcgtgcagcccccggctggctgcagcaggaggtatttcagcgagacttcaggatgaacttccagctggggtcacatgatctgccatccgcatccagtgcttattagcagtgaatgcatgggactgtcctcctggtggagggctggggcctggggtgctacattcacccctggaccgccctaggtgcaacagtgtctctgggtgggctgtgccagaagggaggcaagggagagtgccggggtttggatctcccctcagaccccccgctggggcacaaaaggagcttccctggcctgcagcaccccacccccaccccaagctgcacagcaagagcactgcggagccacgctacatcctgccaccccctcctccatcccacagtgtccccgccccccatcactgcagcaccagagcccctattcccctcagcagaggccggtacaccccgcagcagggagacggaggcagattctcccagaaggggtgaccctgttggggctgggcctattgttgccccctcccctccaggccagactattaggtatccccacctggtctgctccgcatcccaggctgggcagctgggcctagcgaggtggctgcagcagcctggctgtgccagcccctcccccagcgccgcggctgcctctgcagcaggcggaagggcgcgggggctttatccctcaggggccggctgggcaccccgggatggggaggcagtgcggcctggacactggggggatggatctgcagccctcccccccgacaggggaaggccccttcccgggtgtcccaggccagaggccgtcgcgtccctcccacggccgaggctccacacctcccggaccgactccgggccagggtccgcctgctccggttctggcccccgcgggggtgacgttcgggacgtcgggggctcgcgcagatccgcgctggatctcaggcggccctggtgggtcctggatttttgtcccccccccattccacacccaaagaaggagctgcggggagaagggcggcaacgcggcgggcgggcgtgggctgggcccgggtccgccgggcgttgcggggggcggggaaggggcctccctgtccctggcgtcctggacggccgtggccgctcattccggggccgcctcctcctcccgggcgcccaccgggtgccgctgccccagcgcccccgacgcggcgccctccgccccccggcccgggccggtgaaccccatccccggcgcccgcccccgccccgccggcgcctccgctcacctcgctcgcgctcgcctcgggggcgctccggggacccgcgccgcgctcagggcgcccgctcggccgcgccgtccatgggcccggcgggggcccgcgcagccggggcaggggccgggggagcgcgcgggccgcgtcgccgtcgccgccgtcgccgccgccaacgccgcggggagcgctcgctcgggccggggcgcgcgcactgcgggcgggcacgcgcgctcgcggcgcgcatcccagccccgcggctcggcgggcgcggccgggaggttccggcgcggctcgggctcgggctcgggctcgggctcgggcgtccggcgtccggcggggcgtcgtggggggagccggctcggccgccgcgctcggccgcgagtgacaggcccggggcggagggcggggccgccggcggggatgaggtcatgccgagcgaaaaaagcccctgacgtcacctgcagccaatcagcgcgcgcggctcgggggcaggtgacgtcagcggagcccgggctcggggtgaagctgaggcggctgccgcggggggggggcggggtgcagggtgcgggtgggtcgcgccgccgccgccttccgccctcaccccgggaccggctcttaaagggaccacgcggcgtccgggaccccgcctccaggaagccctcccggccccgggccccgcgtcacccaggccccccgtcacccgggcccccggccgcgtcgcacagaccccggacggtccagctgagcggctccgggcgcgaagtcctccccccgacccggacaggcgccggcgccgctccccccttctcctggcctttgttggcgctgggccgccgccggggagccctccccagacccaggcgcggcgttttacctgcagcggctgtgctcgccccgccgcgacccccgcaggacggagccggatccccctgcactcgggcggacctgggaccctcagaggcgagccggctgcctcgggtcacacatccgcgaactccgggggcgggctccccaggacgccgccgaccccccacgacccccagccctcccgcttccgtggaaagccgccccgacgacccctgtgcgggctgttgaggggccgcaccccgccgaccgctgtgggaacacctccgcgcgtgcggcggggacgcggcgagtccggggcaggaagaacgcacgggtaattgcaccttcggcaggtgttgggcgggagcaagggggtcagactcgcgctgcagggggagggcgggggaggcctcgctgtcctggaggaaggggacaaagacccctgcccaggagcctgggagcctttgaaagtaatgattttttggcgggggggggttgtcacgagacaccctagacatttctaaaaggccccctccccgctgccgggtggagagggagcgtggggggatccgccttctgcccccgagcccccagccagcctgggccccccagggtcaccctggggctctgaagggggcttcggccgctggttgaatgaagggccacagaaaatgaagctggcgcaacgaccgcagaaccctcagtgggcaccaggaccacggagctcagggtgccaatggtgatggctgggggtggggagtactgtgggcagcaggggatgctgagcggggtttggggctccccctttccatactcagtcttcctgccagcctcagagctgagtacaccgttggcgattaataagcgcttgcagctcccttccctggccagcctgaggggagcggcagtggcccgtatggggtgggggtggcggtggagtgcgtcctggcgcagagctggcacacagcacaaacaaacgccttggcgggagtgggtctgtcccggaagggagcccaggggttattggggttggggctgcgccccaaagcgggagggccctgcgagaagggaggccctggctggagggggaccctgagactggaggtgccggacccggatgcggggccaggtgagtagggctgcctgctgcagccttgctgggtttgaaaagtgggggaggcttggccctgggagggggcaggaggattcaggctgagacccggagggggcgaaggaggtccttgaggaggcagtcacaggcctgaaaggacctgggacccgcaggcatgggagctgttagccgttagatagaggggctgtcgcctggggggaagcctcacctggcttgttccccctgccaggcctaggtgagcccgatgggcgtgtcttctgcccagctgggatgtggccagcatctgcctgtggcctgggagtgcccattgtcccctaagagctctggttataccctgggcagctactggccaggctggagcaggtggcaggcagcgacctttagtccctcctggaggctcccagggggcggtttggaggggaatacggctcccctggagggcctgggctgtccctggggggcagagtgccctgggcggcgattgttataatccccgtagccattttcatgcaaataagcactgagagcgttaggttctgcccctaaccaggctggcggactagggaggtggcaccctggggaggacggtggtttttctgcagccccgccttagttccacgttgcctttgcacccagcagaggccggcctgggcggtgggctcaggggcctgggtgcccgaccaggtcggctcggctcagctcagctcggcggccgcaccgcctcccggcacaggtgtggacgggggtgggaggcgcgaccagggagggggctgcggtgtcagtcccggcccgggcctgtagacgccgcctcgggggtctctggggctcgggaggaccttgcgaggggccggggaggcgccaaggccgcggcgagggacgtgcgggggtccagcagcctggggcggggacgcgcgctccgggccgtgcaggtgggggtccgagcggggccggcccggcggttcgcgcgcgccctctgccgtccgcaggccgtggcgcaggctcggccgcctgaagctcctctcgcctccgggaggacgtccaaggtcgtttcttaaagcatccctattgcgcagaaggaacagtggggttcacttttctcgctaatgtgcatataatcgttgcaactaattatgtgtagcaaacctccatgccactatttccccaacttttttaagtcaaggcatagctaactcaatacaatgcccatcccagctgttcaagtagactttttctcccgttatttctttaaaaaccgtatgattttttcttgtggtaaaatgcatgcaggaacatacggtgtgccatattaactatttttaagtgaatttggcagcattaagtacattcactttctgtgtaaccgtcaccaccacccatctctggagcttttcgtcttggaaaactggaactctactctgtcctcattagacaccaacttcccaaccccctccccagcccttggcacccattattcaagtagatttttttttttttttgacggagtctcattcttgtcgcccaggctggagtggagtggtacgatctcagctcactgcaacctccatctcctgggttcaagcgattctcctgcctcagcctcccaagtagctgggattacaggcggccactaccatgcccagctaattttgtgtgtttagtagagatggggtttcaccatgttggccaggatggtctcgaactcctgacctcaggtgatcctcccgtcttggcctcccaaagtgctgggattacaggcgtgagccactgcacccagccagtagatgggttttgacaactgtatatgtagttttatcaccatcaaaatgagacctagaaactttattatcccagaagttccctggtgccctgtcctcaccctctgacctgtcaccgtgagttactgctatctgttcgtacactttataaaaatggaaacaatggaaacaaacaatgagaggacttttgcccctggcatctttcactcaaggaaatacttttttttttttccagacagagtctctttgttcccccaggttggagtggagtggcgcgatctcagctcgctgcaacctccgactcccggtttcaagcgattcgccagcctcagcctcctgagtagctgggattacaggcgcccgccaccacgcccatctaaattttgtattttttagtagagattgggtttcaccacgttggccaggctcgtctcgaactcctgacctcaggtgatctgcccaccttggcctcccaaagtgctgggattacaggcgtgaaccaccttgcttggccttaaggaaatacttttgagattcgtccacattgctgctttcccacaacctgatgataacgtctgtgtggttctgtatttcatgggtgtatggcaagagtggaaccaattctttattttttacatattagattattttcatatttgggctataaaaaactgcagcaggccgggcacggtggctcatgcctgtaatcccagcactttgggaggccgaggcgggtggatcatgaggtcaggagatcgtgaccatcctggctaatgtgatgaaactctgtctctactaaaaatccaaaaaattagctgggcgtggtggcgggcgcctgtagtcccagctacttgggaagctgaggcaggagaattgcttgaacccgggaggcggaacttgcagtgagccgagatcgcaccactgcactccagcctgggtgacagagcgagactccatctcaaacaaaaaacaaaaaagaaaacaaacaaaaaaactgcagcagacagcatcctattgtatatgcttaaaaaaagagatatgggatccctctattttatccaggctggactgaactcttcctgggcccaagtgatcctcctgcttcaggcttcccgtagctgagattataggcacgtgccaccacacccaactcttacatgtttgtaacacacttctcagattatttttctttcttccctctctctctttctccatttccttcattccttccttctgtccttctgtccttcctgtcttccttttctttcttgacaggatctcactctgtcacccaggccagagggcactggtggaaatatagctcacagcagtctcaacctcctgagctcaagggatcctcccatcacagcctcctgagtagctggcactacaggcatgtgccagcatctccagctaattaaaaaaattttttttggccaggtgtggtggtgcgtgcctgtaatcctagctactcgggaggctgagacaccagaatcgcttgaacccaggatgcggagcttgcagtgagccaagatcgtggcactgtactccagcctgggcaacggaatgaaactccatctcagaaaaaaaaaattttttttgtagagatgaagtctcactatgttaccgaggctggtcgcaaattcctgggctcaagcaatcctcctctcttggccttcagccttccaaaatgctgggattacaggattattttctttcctagtttttttttttttttttttggatggcatctcgctctgttgcccaggctggagtacactggtgcgatctcagctcactgcaacctccacctcctgggttcaagcgattctcctgcctcagcctcctgagtagctgggattacaggcgcctgccatcatgccctgctaatttttgtagttttagtagagacagggtttcaccatgttggccaggctggtctcgaactcctgacctcaggtgatctgcccgcctcggtctcccaaagtgctgggatgacaggcgtgagccacagcgccccctgcccccaactcccatgtccccagatattgcaaagttgccctgagtggagaattctaataacttgccagcaggctagaagaactccatttaaaacccttgccagggctgggcatggtggctaacacctgtaatcccagcactttgggaggttgaggtgggcggatcacctgaggtcaggagcttgagaccagcgtggccaacatggtgaaaccccatctctactaaaaaatacaaaaattagccgggtgtggtggtgggcacctgtaatcccagctgcttaggaggctgaagcaggagaatcccttgaacccgggaggtggaggttgcggtgagctgtgattgtgccattgcactctagcttgggcaacaagggcaaaactctgtctcaaaataaaataaaataaaacccttgccaacacttgggattttatgcattttgattatagctgcattacttgatgggttgactaggaggacactggagtgtcttctcacacagactccatatttagtttgaagacgtccttctatattgccttataatcttccccagggaggccttacagtcttcccattgcgtatattactcctgagcttatgatttcggttgctttgtgaaaggttataaaaaccacaatttctgatgtgttgttgcctgtcatgggctggctgtcgatcaccctctctgacttctcttactcctccaagcaggccgcctgtaggttcacttggatttcccaggtagatggccctatcatctatgaatctgcactttcgtttctttccaaacctcacattgcttgtttcttgtcatattgcatgggctggcatcaccattataatgctaagtggacatggtgatggtgggagtcttagcttccattccccagaaagtagccagatgcaaagctcagtgtacacattttctggaagggaggaacacaccgagccagggaggaggtgaagctgaggcaaggctgcttcttactcagctgctgtggctttttggaagttgcagctcagctggccacgtctgcacaccctctcccacgagaccatacagcgatgctccacctcagaatggtccacagggaggaggaagggagaatagtttctctgcaagctccttcctgtcttctgctctcataggtcagagttgctctcccgaggaattaagttccctgcatcttcaggtggtgttactggcccctcttggcagctgctgggcaggccagagtgtctgagggtttggggaagctggcacattgtgtggagtgagagagaggttcattaaaattcccaattattcctatacattcccaattatagtcccaattgtatttgtggatttatctatttcttattttagttttgtcaatgtttgctttatatgttttaaagctcagttatttggcacatagaagtttaggattgttttctgtttggttgcatgaactctcctatcatcatgaaatgttatctcttctaataatggttttgtttcaaagtccacattgtctgatcttactatcattatactaggtttttgaaaacattaatgtttgcctaatatatctttttttttattcttttgctttctatcttcctggatcttgatatttagggtttgttttttctaaacaacatgcatcttatttaacttctctctgtttttttttctttccttttttttttgagacagagtctcactccgtcacccaggctggagtgcaatggtgcaatctcgagtcactgcagcctctgcctcccagattcaagcgattcttgtgcctcagcctcccaagtagctggaattataggcacgggccaccacacctggctaattttttgtacttttagtagagacgaggtttcaccatgttggccaggctggtctcaaactcctgacctcaagtgatcagcctgccttggcctcccaaagagctgggattacaggcatgagccaccgtacctggcctaatttctgtcttctgttagcttccgggttatgtattcattatcctttaatggctaccttagagatggttatatttatttatttatttttttgagatggggtctcactctgttatccaagctggagtgcagtggcataatcatggctcactgcagacttgacctcccaggctcaggtgattctcccacctcagcctcctgagtagctaggactataggcacctgccaacacacccggctaatttgtgtatttttggtagagatggagttttgccatgttgcccaggctggttttgaattcctggtcttgagcaatccatctgccttggcttcccgaagtgctgggactacaggcgtgagcttctgcacccatccagagattatgataacatattatcagttaataatctcgtgtcttcataaacaaggcaagaaccttacaactatttaattctgtttatccctctcctgacttctgtgctgttgtcatatattttacttccacaaagtttaaaaattttataggacattgaatattgttttatttatttatttagagacggagtcttgctctgttgcccaggctggagtgcaatggtgcaatcttggctcactacaacctctgcctcccaggttcaagcaattctcttgtctcagcctccgaagtagctgggattacaggtgcccaccaccatgcccagctacttttttttttgttttttttttgagatagagtcttgctcttgttgcccaggctggagtgcagtggtgcgatctcggcgcactgcaacctccacatcccgggttcaagcgattctcctgcttcaccctcctgagtagctgggactacaggcgcatgccactacacccggctaatattttgtatttttagttgagacaggattttaccatgttggccaggctggtctcgatttcctgacctgtgatctgcctgcctcggcctcccaaagtgctgagattacaggcgtgagccactgtgcccagcccttggctactttttatatttttagtacagacagggtttcatcatgtcggccagtctggtcttgaactcctgaccttgtgatacactcacctcggcctcgcaaagtgctgggattacaggcgtgagccaccgtgcctggcccttggctactttttatatttttagtagagatggggtttcaccatgttggccagtctggtctcgaactcctgacctcaggtgatccgccctcctcggcctcccaaagcactgggattacaagcgtgagccactgtgcctggcccaatcatagttattttaaagcccttgtttcctaactccaatatgtggcttatctgtaatctgcttcttctgttagctttccgcatgattattgatcactgtttcctgctgtgtcctgtatctcgtgctttctgtcagaggtatgcctcaaaggaccgtgggggtccatatctagggaccgtggggggtccatatgtcgggaccgtgggggtgtctatatctcgggaccgtgggggtccatatctaaggaccgtgggggtccatatcttgggaccatggggggtctatatgtcaggaccgtgggggtctatatctaaggaccgtggggttctgtatctcaggaccgtgggggtccatatctagggaccgtgggggtccatatctagggaccgtggggggtccatatgtcgggaccgtgggggtgtctatatctcgggaccgtgggggtccatatctaaggactgtgggggtccatatcttgggaccatggggggtctatatgtcaggaccgtgggggtctatatctaaggaccgtggggttctgtatctcaggaccgtgggggtctgtatctagggaccgtggggatctgtatctagggaccgtgcggatctgtatctagggactgtgggagtctatatctaaggaccgtggggtctatatctagggaccgtgggggtccatatctcaggaccgtggggatctgtatctcaggaccgtgggggtctgtatctcgggaccgtgggagtctatatctagggactgtgggagtctatatctaaggaccgtggcgtccatatctagggaccatgggggtccatatgtcgggaccgtggggggtctatatctcgggaccgtgggggtccatatctaaggaccatatgtcgggaccgtggggttctgtatctcaggaccgtgggggtctgtatctagggaccgtagggatctgtgtctagggaccgtgggggtctatatctagggactgtgggagtctatatctaaggactgtggcggtctgtatctcgggaccgtgggggtctatatctcaggaccgtggggctccatatctcaggaccatgggggtctgtatctaaggaccgtggaggtctatatctcgggaccgtgggggtctccatctaaggactgtgggggtctagctgctctcttccaacagtgagcacgtggcctccctctctagtgcagacagggagaggagctgaacatttcgtctacccgctcagttagggattgggccacttcagtcaatcgtccctctgtgtggctttcctggagttttggttaagagcctggccagtccgtgtcttcttatccctgacaggctgtcagagagtcacttctttccctgaggtacaggcttagctctttagttgtctgctcaggcagcttcaaaatttggaaaatgtcttaagggccagattaacctgtgcctggggcaggaccccttcctctagaaaagctctgtgtactaagctccacaaggctatgcgagacttcagcgcacctgcggaggcctcaggcctcacttcttagcctccccagaaatttgcaaatgtcccagttttctgctccagcccctgtggttgccaagagccctgctgggtatttctcccagtagaattcctcttccccagtgggaccgaggctcagctcatacccagcactggttaattccttaaagggagagaagccgacattcagctcatcttggaagggctctctctgaatgttttcatctggttcttgttgcttctacagttctccaatgtcttttttatagatacatttttccggtatttcaaaattgtgggccggatgcagtggctgacgcctataatcccagcactttgggagggtgaggcaggtagatcacttgaggtcaggagtttgagaccagcctggccaacatggtgaaaccccatctctactaaaaatacaaacaaaacaaaattagctgggcatggtggctcatgcctgtagtcccagaaactcaggaggctgaggcaggagaatagcttgaacccaggaggcagaggttgcagtgagtggagatcacactactgcactccagcctgggcaacagagtgagactccatctcagaaaaaaaaaattgtggtaagatacatacggtaggatttcctgaagttatttatttatttatttatttatttatttatttatttattttaccatctgagttctgtaattaatgtggccttctctggttgctgcaatgggattgctgaccttccatatacatcccctctggaatgtcatatttgcattcttctggctttttttgtttgttttttgttttttttgagacggaatcttgctctgtagcccaggctggagtgcagtggcgcgatctcggctcactgcagcctccgcctcccgggttcacaccattctcctgcctcagtctcctgagtagctgggactacaggcgcctgccaccatgcccggctaaatttttgtatttttagtagagaggggggtttcaccgtgttagccaggatggtctcaatctcctgacctggtgatccgcccccctcggcctcccaaagtgctgggattacaggcatgagccaccgcacctggccgccggcatctttaattcagactgccagcttccagaaccctgagaaatacacttctgttgtacatgccagtccatggtgttctgttacatcagcccaaagagaataagaccgcgtggtaacaggccatgatgaccccctagtgattgcttttgcctgatcaaggcaaggcacccccgccctgagccagatgctgagagggtgtggtagaggctgcacggcaaggggctgagccaggtggctgctggtgctcctgcctctgaccgccaccatgtatccaggatccctgctggccagggcgcccacctgcctgctccggtttggttcagggccggtgtgtgtgtgtgtgtgtgtgtgtgtgtgtgtgtgtgtggttcccaggggacccagtgtagccacagatgccccccacctgcctcgagagggaaataaacataaatataccaagacagctatggggtgctggggtgagcggtttattggatgtttaaaggacagagatctgaactcctagtgactgcagagtgagcaagcaccctgggctgtcctgcagggctgtccgtgctggatgtggtgccagcaggcagggcttgcggataggcatttgctgcaggtggctggggcggtggggggctggtctccagatgcctggaagggaggccttgaaagtcattcttcttggatgcatgggcccatggcatttcttggtagaaggtcaaagagaagtgttcatgcttggcaaggcaggagggtgggagatagggtagtgggtggggaaggagagtctggctcactgggtgccaggaaaaggaggtaaaggctgggcaggaatgcctggccatggtaagagtcctgcaaagccagaaatcagatcttgcactggcagcacacggggacacagcaactggactgggagcagcagggcttgcagcagctggattggcaacaggatgacccacagcctgaggaacagcagcagggcttacagcaactgcactgggagcaggatgacccgcagcctcccttagaccccgcgcaagagccacaactggaacaggaacagcaacacacgggcacaccgcagccggagccacagcccccacagccggagccacaaccccccttggatcccccacaagaaccgcagccccccttgcagcctccacaggagccacagccccccttggagcccccacaagaaccacaggcccccttggagcacccacaggagccacagccccctttgccacagctggagcaggaacaagctggcacacagcagcacatgggcttgcagcagcagacaggcacacagcagctggagccacatcccccacagccggaaccacagccacccttggatcccccacaagagccacagccccccttggagcccccacaggagccacaaccccccttggatcccccacaagagccacagccccccttgcagcctccacaggagccacagccccccttggagcccccagaagagccacagccccctttgccacagctggagcaggaacaggttggcacacggcagcacacgggcttgcagcagcagacgggcacacagcagctggagccagaacctccacagccagagccacagcccccacagccggagccacagcccccacagccggagccacagcccccacagctggagccacagcctccggagcagccgcaacagcccatggttctggtggattgagggtggagcaggtagaggagcaggtgagagggaggtgcaggtgtggagctccctgagcctggaccctttatatccctgcccagggtcatgtgtgaggctgggcacacatttcctggttcctgtttgtgccatttttagggcccctttttcttgtttcctctagaaatccgccccttggtgtatgggctgctcagtgggctgctgctctcttgctgaatctgtgtccagacttaatggaggcccccaagggtctagcctctccctgttgactccagagtcacactggatttacaaaagcatctattttaggctgggcatggtggctcacacctgtaatctcagcactttgggaggcctaggcaggtggatcacttgaggtgaggggttggagaccagcctggccaaaatggtgaaatctcgtgtctactaaaaacacaaaaattaactgggtgtggtggctcacatctgtaatcccagcactttgggaggccgaggcaggtggatcatttgaggtcaggagttggagaccagcctgcccaacatggcaaaaccccatctctactaaaaatacaaaaattagccaggcatggtggtgcatgcttgtaactccagctacttgggaggctgaggcaggagaatggcttgaacccagaggtgaaggttgcagtgagcagagatcacaccactgcactctagtgtgggcaacagagcgggactctgtctcaaaaaaaaaaaaaaagtgatctattttagttgaacgatggtataaagagtaatatatttaaaaaatgtaaaaaaaaaccctactcaacttgggaaaaaatggcataaataaatgaagtctctgttcctccatctctccatattgtttctgtcccaccctaataatttcttgaatttggaattcaccactctcatgaaggtcctcacactcctacttaatatgtatgttcctttaaaaatgttttgtggccaggcgcggtggctcacacctgtaatttcagcactttgggaggctgaggtgggcggatcatttgagtccaggagtttgagaccagcctcactaacatggtgaaacctcgtctttactaaaaatacaaaaattaaccaggtatggtggcatgtgcctgtaatcccagctattcgggaggctgaggcaggagaatcgcttgaacctgggaggcagtggttgcagtgagctgaaatcacgccattgcactccagcctgggcaacagagtgagactctatctcaaaaaaaaaaaaaaaaaaagaaaagaaaaaagaaaaaaaaattttacatgctgaaaactttatgtaatgggtattacactgtatttctctttctgtaaattgcttttgaaaaaaataggtgttaggctaaagagattttctctagggatacatatggttttaatttatttgttttctctgatttctaaatatacattgacttatccatttacttgttgatggaccttttgtttcctttttgttgctatttcaagcaagctgcaactttcttgcccaaaacccctcctgcaggtgtgggtgcctgaaagtcaggaggttcttgttaccaagctgtcttcccaagggatccccccagccagctgctgtccaaccagcattgccagagagctcctgtttcctggcacccccaccaaaacttgcaactgtcaacttacacccttcatgtgggtgtgtaacacagtgttacacactgtggtttaatattccctcttcctggttactagccatgctgtgcctctttccatatggtcacctgtcattagagtctcgttaatttcacgtccttggcccactttacaaaattgagatagttattattattaatttttgagatggagagtcttgctctgtctcccaggctgtagcgcaatggtgcgatttcggctcactgcaacctccgctttccatgctcgagcaattctcctgcctcagcctcccgagtatctgggattacgggcatgtgctaccacacctggctaatttttgtatttttagtagagtcaaggtttcaccatgttggtcaggctggtcttgaactcctgacctcaagtgatccacccacctcggcctcccagagtgctgggattacaggtgtgagccaccacacctggccaagatcattattatttttattggtgtctgaagttctttgaattttctggattcttttattttgagatggagtcttgctctgttgccaggctggagtgcagtggcatggtctcggctcactgcagcctctgactccctggtttgagcaattctcctgcttcagtctcccctgggattacaggcacgtgccaccacacccagctaatttttgtatttttagtagagacagggtttcaccgtgttggccaggctggtctcctgacctcatgatccacctgcctcagcctcccaaagtgctgggattacaggcgagagccacagcgcccagccttttgtttcttcttcttcttcttcttcttttttttttttttttttttgagacagagtctcgctctgttgcgcaggctggagtgcagtggtgtgatctcggctcactgcaacctctgcctccgagttcaagcaattctcctgcctcatcctcctgtgtttcttcttaacatagatgtcatttattctaagtttttcaaatttattgggatgtacttttcatagttgcctctgtttttgaagatgggatcttgctatgttgtccaggctggggtgcagtggccgttcacaggcaccatcatagctcactgcagtctcgaactcacgcctggcctcaagtggtcctcagcctctgaagtagctgggactactacagactaccacatttgactactacaaatccctaccgtgtgccaccacgcctggcttagtagcctgttatttttaatagctgctaaatttgtcattatttgctttcttttctttcttttttttttatggcagggtctcactctgtcacccaggctggagtacagtggtgtgatctcggctcaccacaacctctgcctcccgggttcaagtaattctcctgccttagcctcccgagtagctgggattataggcacctgctatcatgcctggctaatttttgtatttttagtagagatagggttttgccatgttggccagcctggtctcgaactcctggcttcaggtgatccacctgccttggcctcccacggtgctgggattacaggcgtgagccaccgtgcccagcctatttgccgtttttcatccctgcttcaggttatacatgctctttctcctgcccgaccctttttttcctcattggttttgctaaatattgttgattttctttgtcttttgaaagaccagcttttgattttgttgattctgtttgttgtatgtgttaaacatttttatttagttctgctcatatctttattttctccattgttctttttgcactttctaaacatgcgggtgctggggtgcgtgactgtctgctggacgtggactgtcaggccaggaggcgtgcgatagagagtcactgccatctgggctttctatctgtccctccttccttccctccctccctccctcccttttctgcagtcattttcattcagcttctttcagcctttctgcaagcttctgggtgaggtaactactgtggggctgctttaaaagctcccatattttggggtctctgttctttacccgatgagctaagcctgtggggtttgctgtgatttctgacatacgtgggctgcttcccaccaccctttgcatttcaccatcctgtggtagtgcttccttcccctcttcttttagatggagtttttaaggttctgtttttgtttttattttgttttgctttgactgacttagaagttatatacactattcctgtttttagcagcaaccttatgcatttcatgtgtatttttaaacaaatgttgtctacacgtgatggccctctattcctcccctgctgagagttgtgcagggagctggggacagcttcttcccctgcccagcccctccggtgtcagctgtgggagtttctccagcgtcttagctcctctcacattgctcatcattgtttatttatagtcagtatttgcttaaacttgccacacatccaccaacaactctaggcgtggttcttgcttacaccatacttcttccttccgggctcagcttccttcttcctgaaaacatcctccggaagttccctcacaagcattcatcagtagacagtctgcatttttacatggaggtggcttgtttcctgctcctcctgagcattcatcagtagacagcctgcattttcacatggaggtggcttgtttcctgctcctcccgagcattcatcagtagacagcctgcattttcacatggaggtggcttgtttcctgctcctcccgagcattcatcagtagacagcctgcattttcacatggaggtggcttgtttcctgctcctcccgagcattcatcagtagacagcctgcattttcacatggaggtggcttgtttcctgctcctcccgagcattcatcagtagacagcctgcattttcacatggaggtggcttgtttcctgctcctgggctcaagccatcctttctcctcagcctccccagcagctgggatgacaaaggcacaccatcacactcagctaattttaatttctgtgtagagatggggtctctctaagttgcccaagctggtctagagttccttggctcaagcaaccctcccaccttggcctcccaaagtgctgggattacagacgtgagccactatgcctggcctgccctcacttttgaataatgctttggttggcacaaaattcctcagtgcttgaaaggtgtcactggcggctgtttcgtctgttgctgctgtcactttctctgcccctccgctggagtccccagccttctgagtctgctgtggaagctggagtctctggccttctgtgtccgctgtgaaagctggagtcctggtcttccgtgtctactgtggaagctggagctgcctggccttctgtgtctgctgtgcaggctggagtccctggccttccatgtctgctgtggaagctggcttgcacatttggttctcccacctgcttcatgccatgtccttcctggaccgagggttccagtttcaaccttgggagactctccctgtctcacctctcccgagtctctctcatctctagttggacaaatgtcaaatctactacatgtccccatatgtctttttttttttttttttttttaagacagagccctgttctgttgcctaggctggagtgcagtggcaagatcttggttcactgcaacctccaactcccggagtcaagtgattcttctacctcaacctcccaagtagctgggattacaggcgcctgtcaccatgcccagctattttattttattttattttttgtatttttagtagagaaggggtttcaccatgctggccaggctggtctcaaactcctgacctcatgatccgcctgccttggctgcccaaagtgctgggattacaggcgtgaaccactgcgcctggcccccatgtgtcttttttaaaaaaagaaaaccgttttattgagataaatgtgcatatacagtttgtctatttaaaagtccacaatctggccaggcgtggtggctcacacctgtaatccctgcactttgggtggctaaggtgggtggatcacctgaggccaggagttcaagaccagcctggccaacatgatgaaactctgtctctactaaaaatacaaaaattagctgggtgtggtggtgcatgcctgtaatcccagctacttgggaggctgaggcaggagaatggcttgaacccaggagcggaggttgcagtgagctgagatcttgccactacactccaacttgggcaacagagtgagactccatctcaaaaaaataaataaataaaagaagaccgtcataagtggagaaatatatcatgttcatgggtggaaagtcttaacattataaaaagttcagtttcttatattcatacattcaatggattttattcaattaaaattccagaaggatttaattctgaaaattattccatagatctaaaatttatgtgcaaacttgtgaataactgagacactcctgaataatattcagaaggggtagtctctgcctgatattaaggcataataaagtcttcgttgttaaaacagtttgctactagcacatgaatggataaatagttagaagtacagaacaggaacccagaaaagacccatctattgcagagctttaattttttttttttttttttttgagatagagtttcactcttattgcccaggctggagtgcaatggcacgatcttggctcaccacaacctccacctcccgggtacaagcaattctcctgctttagcctcccgagtagctgggattacaggcatgcaccaccacactggctaattttgtattttagtagagacggggtgtctccgtgttggtcaagctggtctcgaactcctgacctcaggtggtccacctgcctcagcctcccaaagtgctgggattacaggcgtgagccaccgtgcccagccagaggagctttaatctttaacaaattgaatggggaagatggctcactctatgcagagaattaaaattagatgcctacctcacaccctctataatccacatggattgaagacctaaaaggatatgtaaaagtgaaaggaaaatataaaaagagtggaagataatataggagattgtgtttattatcttggggtcaggaaatgaattcttaaatatgatccccagaacataaacagtaattaggaaaatgctgtatttaaccacatcaaaattactgatatatgtctggatatcaccccacaaaaaaaccattaaaagatgattggggccaagtgtggtgggtcacccctgtaatcccagcactttgggaggccgaggtgggcagatcacctgatgtcaggcgttcgagaccagcctgaccaacgtggtaaaaccccatctatactaaaaatacaaaattagccaggtgtggtagtgcatgcctgtaatcccagctactcgggatgctgaggcaggagaattgcttaaacctgggaggtggaggttgcagtgagccgagattgcaccattgcactcccgcctgggcagcaaggtgaaactccgtctcaaaaaaaaagaagattgatcaactgggagaagatatttgccatttgccatatttataacccctagaagctaatgtctagacaggaaccctgaaaatcaacagaagagggcaggagacctagtggagaagtgggcaaagcataggaatagaccacccacagatggctagtgaggacgcgaaaagaccttcaaccttatttttaatcagagttaagcaatgaaaacaaaacgcccctggtttttgaagagaatggaaacacctgcagtcttactgatatgttacatttagcgcgtggtatttagtgagaggcgtgagcagctatgtgcttacctgcagcatacagcgggagtcgttacgtgacttctgcctttcaagcacatacagtgtaatgggatccatccatcacacaaatatactagctctgtacacagccttgaggaggagcaatatttttggttgttataaactgcattttttttttttggtatggccttttgattctgggaagcacattcattctatggctattgcctttttagatcatgaaagcatcattccatattgatgaagaagatgtagatatggcactgatcaacacctcagtcgccttccttccaaaacagatacttctcaagaaatctggggccgggtgtagtggctcacgcctgtaattccagcactttgggaggccaaggtgggcagatcacaaggtcaggagatggagaccatcctggttaacacagtgaaaacccatctctactaaaaatacaaaaaattatccgggcgtggtggcgggtgcctgtagtcccagctactcaggaggctgaggcaggagaatggcgtgaactcaggaggcagagcttgcagtgagctgagatcgtgccactgcactccaacctgggcgacagaatgagactgtatctcaaaaaaaaaaggaaaagaaatctgttctcccaggctccccatttcagcatcccactcattgatcattgaaaactcattcactaggttcaccactcctgggtgttatgctgagcaatgaggatattcatcatggtggattatatggcagcaaagagctcaaaaaagggtgatggatgtgggaaatggggggcaggaatctagtggaacacacttcagtggccagaaataatgcattgtattttcatgtagcaatacatgccaaaagcaccagatttgcttaaaacgcaagaaacagaacagaatttataaccatcatgaatttaaataacatacacaaggctggacacagtggctcacgtctgtaatcccagcactttgggagggccaggcaggtggattacttgagtccaggagttcgagaccagcctgggcaacgtggtgaaaccctatctctacaaaaaatacaaaaattagccaggtgtggaggtgcgactgtagtcccagctacttgggaggctgaggcaggaggatcgtttgagcccgggatgtggaggttgcagtgagctgagattgcaccgttgcactctatctccagcttgggtgacagagcaagacctgtctcaaaaacaaaaccaaaaccaaatacatacacattgaaaaatgctacatatttgtcatgattatatgcaaatgtttgtaaataacttatggaagatgaattggaaagatacctgcaaggatggatgcctatgggtggagaggatgatgggacttgggataatgaaggagaaaaaagttaaataaaaacaatgtctatataggattcattagctgaggattgtgatctataaaattctcagcacatatatgatgcatgcatatatatatatatgtatatatatattttttgagatggagtctcactctggttgcccaggctggagtgcagtggcgtgatcttggctcactgcaacctctgcctcctgggttcaagcgattcttctccctcagcctcctgagtagctgggattacaggcgtgccccaccatgcccagctattttttttgttagttttagtagagattgggtttcaccacgttggtcaggctggtctcaaacttccgacctcaggtgatctgtgcgcctcagactcccaaagtgctgggattacaggtgtgagccactgcacccagccaggcctttgtttttattttgcctactattagtatagcttgctttgcatgttatgtctttttctacccccccttctttttttttttttacatttttgaatccttatgttttagatgcaacttttgactttacatctagttatacattttttaagaaaacttgtctagcaatctttatatgtaaactagagcattttgtccatttacttgtgaaataattactgaaatatttgggtttaaaacctatgttcttagtctgaattttctattgcatcacctgatctatatttctttttctcttctgttctttttgattagtgcttttttattctagttttttatgtaattgtttgactgtcatacatgactttggttaggagtcttggatcttctttgcttcttttcaatttttgtcattgtctcttgaatcctttttagttcttcatttctttttggtttttaaaatttattgtacttttttactcatacgtttgtcccactttagactttatttctagagtgatttcttttaactctaattttctcttaagtgatgtcccctcatttagcaattcttctatttatgacttttgttgttcatttatgtctctttttttgagatggggtttcactctgttgcccaggctggagtgcagtggcaggatcatagctcactgcagcctcaacctcctaggctcaagcaatcctcccgcctcaacttccctagcagctgggattaaagacacacaccaccatacccacttagtttttaaaatgttttgtagaggtgggggtctcactatgttgcccaggctggttttgaactcctggcctcaagtgatcctcctgcctcacctcccaaagtgctgggattacaggtgtgagccaccgcgcccggccttatttatgtctggtatcatttcctttcattgttcattagctcctttggaaacagtaggctaccactgtgatctgtttcacggcaggcttcctagctttcttccattgcctctagggacttaccgagggcccttgcacccactcaccactagagggaggaaaaccttccccatttcaggagccaaatccaaaattcatgctgcgcttttccagcacacacctgttggctcttttgaggttcccctgttttcgtctctgttagatgtttcttcgctttctcctgcacagacactgaaaccctgggggactgtggctcttggaaatttatccccaccttcttgtacttttaggttcacctgctttttcttaagacaccatctcactttatattgcccaggctggagttcagtggtgcgatcacagctcactgcagcctcagactcctaggctcaagccatcctcctgcctcagtctcccaagtagctggggctgcaggtttgcgctaccatgcctggcttacctggttttgttataagtctccagcatgcatttttggttttgttaccgagttgctcggtgtcctgtgggctgtgggaatgtacagggcccaaatgtaatgaactctgcgttcatgtctgctgccaccttctggagtttcccagtttggatttttgagtaaactgtcttaagcagcatttccttttaacgtcgtgaaactaacgatagccatgtcccctagcaagatgcacctttgacacacttttattccctctcctaaaagtggctgaattaatctaagcctttatttctagattatttcatttttccttacattgcatctcttttctctcagaaatttgtcctggaaattcccactctgctcttccctggcattatcagcagtcgcttagatctgtgggtgttctgtgggagctcatttctcaccagcgctccctgtgtgctctcttccctccaccttttccctccaggttcgcttgtctggagatcatcctcagatcactctcgtcccctcctccccagtgcgtgatttctaaagccttgcctgtgacactggtcagagaacaggctcagcgtggtggcacgtcaccatgaaacagatggacttggctcagggtccccaaatgtgtcatttcccaggaactcccctttcctgccgggagactgagctccgaggacaccttgggccattctgtaacttcctggttacctttagttatggaaagccgttgacctcatgattgtaaaaggctaattgagtgtttgaatcagaccgcgctggagctcagcggtgcttcactcctccctcctccgaccttgccctgcctggggtccttccgaggccccagaggagagcgggaagctggaagccatgggtcttgtgcaaggccctgcttggctggtcgtcaggactcagggcccgcctgcccctctgcgcctctagggcgggcattgaatgccgaatcctccccgggctgagccctcttctcctgcaagcagagactgtgaagatatttgaggccgagaggaggacagaagggaatggcaggcttttttgtgaatgtaccaggcctgctggcaggcgtttcccagcttagctgacagatcagaacacagaatcggtcaccgcacaggaaaggggttggacagaattgcaccaagtatacagttgatttacagacatgagaggctttattgcaaggaaattcattcattattttgttatttttttttaaacagatggagacaacaggaaggaaagagaccttcctggtcacacttgggccacaggagaacaggcagcggcccaggaggatccagggtcctgatggtggttgagaagctggttcttagtgatcactcagaaacgtcggcctggccttgtggggtcagaccttgcatctcagtcagcccagggagaagaagaagatggtccacacccaagtgcagggaacatcgtggcagtcggctgggtgcctgcgtccaggcgaggacacctcccgcatcagggaaacacacgtttctggagtgaggaggctgaaggcagggcccagaggagagctgagccatggaaggaggtgtgtgcatggatggtgagctagagcaggtgcaggtgcctcagggaggatgtgtgggacgaactgactcagggaaccataagaaatgctttcaccaaacaggagaaacctgaaggtctgggtccagagcctcagatcttacactggcagcacacagggacacaacagttggactggcagcaacagggcttgcagcagctggactggcagcacacggggacacagcagctggactggcagcagcagggcttgcagcagctggactggcagcaggatgatccacagcctgaggagcagcaacagggcttacaacagctggactgggagcagccacaagaaccacagccccccttggaacccccacaggagccacagccccccttggagcccccacaggagccacagccccccttggagcccccacaggagccacagctggtgcaggaacaggctggcacccaggagcacacgggcttgcagcagcagacaggcacataacatctggagccacatcccccacagctggagctgcagcccccacagccagagccacagcccccacggccggagccacagcccccacagccagagccacaacccccacagctggagccacagcccccacagccggagccacagcctctggagcagccacagcagcccatggttctggtggattgagggtggagcaggtagaggagcaggtgagagggaggtgcaggtgtggagctccctgagcctgggctctttatatacctgtccagatgtcaggcatgacacagggtccctttcttgtgactgtttacactatttttccagagctctatttttttcctctttgctagtgacttccttctggctcagttgagcatctactttctttgttttctaaatttgtctttttccccatttgttttggcccctacaattaaaacctcagctccaggctgtctggttcttcctgcaaagctccagggtgctggtcacctgctctctgctgaccacatgtgaccaatgggcaacagcctctgcccacgtgctctcatctttcctgtgttgactccctcaataatattaattttacatttttagatttcaaaattatccacgatctttatactcatgccagtctcagctttccgggtgtgttagaccattctttgcattgctctaaagaaatacttgaggctgggtaatttataaaggaaagaggttagaatggctcatggttctgcaggctgcacaagcatggcacccacctctgctcagcttctggggaggccctcagggagttttcctcacggtggaaggcgaagcaggaacaggcacaccacatggtgagagtgggagcaaggggtgaggaggagccacacacttgtgaacaaccagatctgagtgaacacactcatcgccaagggggtggcactaagtcactcatgagggatccacccccatgacccagacacctccctgcaggcccctccttcaacactggccaacaactatatgaaaaaatgctccacatcactaactattcggggaatgtaaatcgaaaccaccacgagataccatctcatatcagtcagaatggcttttgataaaaagtaaaaaacaaaacaaaacaaaaaaacctaaaatcagatgctggcaaagcttgagagagaagggaacacttgtacactgtcggtgggaatgtaaatgaattcagccaccacggagagcagtttggagatttctcaaagagctaagaattgaactactatttgacccagcaatctcatgattgggtatatacccaaaggaaaataaatcaatctaccaaaaagacacatgcatccatatgttaattgcagtgctattcacaaaagcaaagatgtggaatcaacccaggtgcccatcaatggtggattggataaagaaaatgtggtacatatacaccatggaatactacacagctgcaaaaaagaacgaagtcatatcttttgcagcagtatggatgaagctggaggccgttatcctaagggaactaatgcagaagcagaaaaccaaataccacatattctcacttataagtgagagctaaactttgagtccacatggacataaagatgaaaaccatagacactggggaacaagaggagggaggaagggagggagggggcaaaggctgaatactggggaacaagaggagagagcaagggggcaaggactgaaaaactactgggtaccacagtcactattttggtgatggattcattcatactccaaacctcagcatcacacaatatacccatgtgaaaaacctgcacatgtactgcctgattctaaaataaaagttgaagaaaaagttctttatatactctagatactagatgcttatcagatatctgatttgtaaatcttttcttcctttattatgtagactgttctttcactttgttgatagcgtcctttggtgcaaaaatatttaacttttgatggcatccaatgtatttgtatttctcttttgttgctggtgcttttggtgtcctatctatgaatccacaccgaatccaaggtcatgttttcttttaatagttttatagatttgactcttaaatgtaggccttttgacccattttaaattaattagtgtatgtggtgtgaagtaggggtccagctcattcctgtgcatgtggatgtctagtttcccagcatcatttgttgaagtactgctcttcctccattgaatgatctggcaccctgtcaaaaatcagttggtcatctacatgagggtttatttctggctctcaattctattccactggtttatacatttattctaacaacagtgctaaactgccctgatgactgcagctttgtagtaagttttcaaattggcaagtgtgagccctccaacattgttcttctttttaaccttgttttagctattccgggtcccttgagattccacatgaactttaaaatcagcctgtgaatttctacaaagaagccagctgctttcctgatagagattgcatagactctgtagatcaattttgggggtattgccatctgaaaaatgttaagtctcctgatacatgaacatcagtctgcttttgggctgccataacaaaataccacggatttggtggcccaacaacaggcatttattttctcacaattcagaagtccaagatcgggtgcaagcaacttttgtttctggtgagggctctctcctttggttgcagatggccgctttcccactctttgctcacatggcctttcctttgtgtgtggagagagaaagagttggagggaggaagagagagagagagagagagagagaaagagagagcgagacagaggcaaatgctccctggtgtctcttcttatgaagatgcaaatcctgtggaagcccttatgaccttacgtaaccttaatttcttccttggagaactcgtctccatatacaaccacaatgggagtgatggattcaacatatgaatttgaaagaacatgaatattcagtccacaacaaatctgggatgttttagatcttctttagtttctttcaacagtgttttgtcactttcagagttgcaagtgagtagaaatacaattgatttttatatattggtcctgtattctgaaaacttgctggattcatttattagttctataatctataaaacactggccgagcacgatggctcatgcctataatcccagcaatttgggagcccaaggcaggtggatcacatgaggccaagagttcaagaccagccaggccaacatggtgaaacctcatctctactaaaaatataaaaactagctgggcacggtggtgcatgcctgtaatcacagctacttgggaggctgaggtggaagaattgcttgaaccaaggaggcagaggttgtagtaagctgacattgtgccactgcactccaacaaccgagcgagaccctgtctcaaaaaaaaaatctataaaacattagtagctcttacaaattgacaagtagaatacaaacaaccaagtttttaaaaagatgattctctgataaacaaatggaagtgtgcaattaaaaatataaaaagtaaatcagactcactggtagtcagatacacgggatcttttctgtggagtcctaatgatggaaaaggagccaggttggttggaccaagggaaagcaaaaagagaaggcagatgaactacaagtctgcctttcttcctggtgcaggacttagccctcctatgcaaataactcacataactcacaatcttcctgcactcaacttatgacctcagttgatagaaaaatgcaaattagctcactgaaaccttggcattatcagcactgcatgtaaccctctccggcacaagcaccatcctataaaatccccagcaagcctttgtctcctggcagccagctcctcccttgctgacctgccctttccattcttgcaacgtattttcctacattctctaataaatctgcctttccttacctacaactgtcttggtaaattccttttctgcccacgctagtggactcagttagtggctacctgcaacattttatatctactagactgaccaaaattaacaagaataataacacctattgctagtgaaattgggggaaaaggtactcatacattgttctggggatacaatttattacagtttttttgaaaacaatatctaataaaattaggtcatatcaatacaattagtcttgaaattactgaaaaaagattaaacgtaaacatattcgtgtatacatatatgtgtatgatctattatttacagtgtcagaaaaagaatcctagcaaattgaaaattaatactaaaagtcatacccactaaaaaataagattacacctgtaccagtggacttggagaaatttcctcaaggctctggctagtgtgaaatgtagatgcagagaaatgagccctgtaggatcctattttagtagcaagcaataaaaatatcttttacacatatgttgagtgtgtgcctggggtacgtaggacagtggctgggtggagtggggaaggtgtgtaggaatcaacaaaaagcaaatgacagtgaaaagtgagtccagtatgtgtgatcctacttgtggaaaaactccacatatatgaatacgcatgcgcgtaaagaaacatagacttatacccagatctacttcctaggagaggcaaccatgatacaagttctagtgaaaagaattaagttgcaaagaaatgtggataataaaatccgaattggtagcaatacccaattgtgtatgcgcatctattttttatacattgtatgtgcaagtaggagggttgggtgggggtgcctgtggggcctggcactgggggtggcttttattgttttttaattgtgtatatttaagacatacaattcgatgatctcatatatgtctacattgtgaaataatcaccacagtcaagataattaagacatctgccacttcacatagctctctctctctctctctcttttcttggtggtgagaacatgtaggatctaccctctcagtacgttttaagtacataataaacaccgtgttgttacctgtggtcactttgctatgcattgggtctccaagccttatttatcttgaagaactgaagctttggacccctgggccagcacctcctcatttcccctttccctgcctctggttcccatgcttgcactctgtgcttctgtgagtttcactcctgtagactccatgtgtgagggagagcgtgtgatgtctgtctttctgtgtctgcctcttttcaccctgtgtaatgtcctccagatttgtacatgttgttgtaagtaaccagatctccttcttttgaaagctgaagaatattccatatatacacgtatagatgtatgcatatattccacattttgaaaaagtcaaatacatagaaacatagaatagaacagtagttaccagggtctggaggaagaaggaaagggggaggaggaggtcaagggcttgcggttgtgtaggagagggagccgagcagtccagtgcacagtgcaaggactacaggtgacagtcaggtgttgtgtgtggcaggtgtgctgagagaagactccaggtgctcctaccacacacacatacacacacactaacatcgtacacacatacttaccctcatacacacacatacacacacacactcaccctcatacacatacatacatacacacagtctcacacacaattaaaaacacaccttacacacactcatacacacataatcatacaaacacacacactcatacacatgcatacacactcatacacacacttatccaaacacacccatgcacacacacttatacacacacatacaaaaaggaaccatggaaggtgttggagatattaattgcagccatcatttcagtagtgtacatgtttaccacagcaccatgttgtccaccatgaatatgtacaataaaaataaatgtaaaaaaagatgtgtcttgggagagtccttcataataacacctgagaggtgtcacctttcttgactttttctgaccatgaaatgcacctgccaaggatggcagacgtagggaactgacctcctgggccctcacgtgcccaattatctttggccctccggactggagcagtttgtagaccttggaagcagggccccagcactgactgcttggcctcaggcctctgccccatcggtggtcaggtggcggccacgagggcgtgggagcttggccatccctgcctcctggagtggacgaggttggcggctggtcagcctgctcctgccccacccttgcctcatggaccctggtagcatcactggctcagccttgctgggcatgcacaggcagcagcacccgctctgatccaggaggcttgccctgcttttggctaagttctgggtccggccactgccacagaaggctcagtcccctgtgtgatcctcctggctgctgctgggtgcccatggcgcccctgatgcccttcccttgacagggcttgggttagcatcaggccaggaccctctgggactgggacttgtgccctgtctggggtccctgtcccacaggttgggccagaggccacagggcatgctgctggctggccatggctgcaggaacgtgacactcacccttccctctggcagcctccaagtgatgagttttccagtggatattaatttcctgaggccaggagccatctggggctacagggcagcctgccgtgtgccatcctggccccttccacaccatgctggccactgcctgtcatgggggtcggaagcaggcgatcccgtgcaggaggtgtctctggacctgcctcttctcttgctcatcacaaggccaggccaagcctggtgtcaggaccctggtggggttgcagggccaggcctgtcccctgtgcctggggtgtccagggcacacatagaggaaataggggccctgcatcccggctcctcaatgtactgtagaaatcatgggccctcaacattcaggtccgtgggaggcatccacagagacttccaatgaaggaactgttagacaactcctggtctctcctgagctggggacaggccagccacaccctgagcccctggggacccccagagagtggcctactgtcttgggctctgaggaagtgctctcattgtagagcacgggggatgttgtggcccactcctctcaattttgctgtgaacctaaaactgctctgaaaaaaaagtccattaaaggaactagcatgggctgatggggaggggctcattcacccctgagttggacaccgtgtggctacgaatccaccctcagaccacagagtggatttcggcagcaacaccacaccctagcctcatcctgagctcaaatttaactcagatagaccaggccctttttctatcgttcttagccaccattaaaccaggtcactcgttctgtgtttttgcaattggcttttaaacaaaagagctgggtttggtgtatgtttccttgtcaaatatttttttccaataacacaggtggaagaaaacagacagggcctctttctggtccagccatggggtggaggccgtttttgactttcaccttcctctgtgggtccagctctctcttgcttgttggctctgaggattatttagtttttcaacagctcagtgacttaaaaaaaatatatatgctttaaacatagcactttaaagctttatttatttacttacttatgtatttatttatttatttatttagagaaagagtctagctctgtcgcccaggctggaatgcagtggtgcgatctaggctcgctgcaacctccgcctcctgggttcaagcaattctctttcgtcagcctcccaagtagctgggatacaggcgcccaccaccatgcctggctaatttttgtatttttagtggagacggggtttcaccatgtccttttagaagtttcagggttgtgaatagtgtctagtcaaccttactaccgaaacagaaactcagaagcaatttctgaaacttccgtgttgttgagttttcactttcttgtcgcagttccgccaggcactcactgcctaccatcctgtgagacggtggcttcccgagcagcctccagcgctctgctgttacagacgcctgggtctgggggctccagccttgcagcccacctcctcctccgccagctcctgccttccctccccatgagtcgaacatgctggactttggtctaggccctccagcctccggaactgggagaaatggtgtctgttgttccgtcttccaggcttactctgtgggttttgttctggcagccccagctgacagaggcagcagggaagggacaggtgggcacctgaatcagaagtctgtgtagggaggtgtcacaaggaggcaggaaatagatgtctgtaggaagccttccaggagatgctgagggatttggcgacttgtgggggagagaagcccaaggggcctcccaattctgtatcctggaagatgggaaagacggagacgccccaagccaagtggatgccacggctgagttgtgccccctggttcatatgttggagtcctcaacgcagtatctcagaatggcaccttatttgaagataggtctttacaggggtgattagttcaaacatggacctaatggagtagggtgggccctagtctaatctgtgtccttatgcaaagagatgaggacgcagacacacacagagggatgagtacgtgaggatatagggatggcggcatcagtaagccacggagggaggcctcaggaggacccggccctgaggcacctcgatggcggattccggactccagactgtgagacaatccactcctgttgcttaagccacacggtttgtggagcagccctagcaaactcacacagcagggtacggggggttcccaaatgcctgggagtgcaactctgtggaaagtgtacatttctctaatcacacagaagttgaaacaaaagaatcacaatgcaaactcgtgggaggtgcagatcgtatttatttagaagatctagcctaggcacttacaaggcgaagccctggggaaagaaacagggccaggtcggaggtagaagaggagactgggcgcccctcctcctcaggagaggatcctggggtctccaataattccgagtcctctaggtcaactccaaaagcaatcggagcggtggcagctcaggcaggatgaagacgaagcggggaggagccaggaggttgcggggaccggggagaggcggcagcaggtcggaggattccagtgtcagcgtgtttccagcaggctcacaggaggggcccagggatgtgggatcttgaagccctgagaaggttgaagtggtggggtcaggaaaggaagacgggattccgggagggttgatgggcaggacccagcatgccagaagccctcatgacctcagaggctgagcggctgagtactgagccctggacgctaggctgccttagtccagaggaggacagattcagagacgtgcttcaggaattcaggacacagctgcaatcattcctggagagcccggatctgtaggacccactgaggtttgtgggcagagcctcagatcttgcactggcagcaaattgggacacagcagctggactgggaggagcagggcttgcagcagctggactggcagcaggatgacccacagcctgaggagcagcagcagggcttacagcagctggactgggaacagcagggtttgcagcagctggactggcagcaggatgacccacagcctgaggagcagcagcagggcttacagcagctggactgggaacagcagggcttacagcagctggactgggagcagctgggcttgcagcagctggactggcagcaggatgacccacagcctgaggagcagcagcagggcttatagcagctgcactgggagcagccacaagaaccgcagccccccttggagcccccacgaaatccacagacccccttggaacccccacaggagccacagctggaggagcagcagacgggcacacagcagctggagccacagccccccttggagcctccacaggagccacagccccccttgcagcccccacaagagccacagacccccttggagcccccacaggagccacagctggagcaggaacaggctggcacacagcagcacacgggcttgcagcagcagacaggtacacagcagccggagccacagcccccatagccggagccacagcccccacagctggagccacagcccccacagctggagccacagcctccagagcagccagagcagcccatggttctggtgggttgagggtggagcaggtagaggagcaggtgagagggaggtgtgcaggtgtggagttctctgagcccgggctctttatattcctgcccaggtgtttatactgaacacgtgaatacttctgttgttgtttctgctatttcacatgcacaagtgttatttttaatctctccacaatcccatgagccaccatcagctcaagccaagctgtcctttccttggtttctaaatttggcctcttcctcataggtgtttccctttgttagaagacactgggctccctctccagtgggtgtcccaggagcctgggaggcggtggttgcttggccgaagggtggaccattgtccttggtgctcagggctctcctcagcgatgcagaccctccaccccctggcattggtgtttatatcaaggatggtcatttggtaaaaaataaaataaaataaaaattaaaaaaataagctgaaagaaaggctgtctataggttccaccgcttaaaaacttcaagtataaatattttgtcaaatctgtaaaacaaagttttgaagagcatggatttgagtgtggccctggttctcctttgtctttcttacctcttcctcctgcggtttggctcactcctccagacacggattagacccacgttcccttcaggcaagctgggctcacagagggaacagaggaacaggaccctttctaatgcttttgagttttcctctattaattctttgtaaaaattctacaaatcaatggatattcttcaagtttattcttcttgaaggctacaaaaattttgattagccaacctctctaacacacttttattttctaaaagattaattttaatattttttttttgagaaggagtatcgctcttgtcaccagggctaaagtgcagtgacgcaatctcggctcactgcaatctctgcctcctgggttcaagcaattttcctgcctcagcctccccagtagctggaattacaggcgcccaccaccaggcctggctaatttttttgtatttttagtgaagacagagtttcaccatgttgggcaggctggtttcgaactcctgacctcaggtgaaccacccgcctcagtctcccaaagtgctgggattacaggtgtgagccactgcacccagccaaattttaattttttattaaggtaaaatttacatgcagtgaaaaaaaattttttttctgagtctccctctgtcacccaggctggagtgcagtgatgcaatttcagctcactacaacctctgcctcccgagttcaagcaattctcctgcctcagcctcccaagtagctgggattacaggcacccaccaccacacccagctaattttgtatttttagtagagacggggtttcactatgttcgccaggctggtctcgaacccctgacctcaggtgatccacctgccttggcctcccaaagtgttgggattacaggcatgagccaccaggcttgggctgcatttttttttttttttttttgagacggggtcgcattctgtcgcccgggctggagggcagtggtgtgatcctagctcactgcagccttggtctcctgggctctgcacatattttgagtgtacaattccatgagttccgctaaacatgtactcgtgtgcccatcactccaaccatgaccaactgcttcacccccagaagtttccctttcgccgccttcccttcctgcccatcgctccaggcacagctctgctgaccagttgtgcctgttgttgaatgttgcaaaaatgaaatcattaaaaatgtactctggtttctttccctcacgatgttattctgtgtgtcaatgatttgctcttcttctttttttttttttttttttttttttgagacagggtcttgctctgtcacccaggctggagtgcagagtggtgcgctcatggctcactgcagcctcgacctcctgggctcaagcgatccacctgccccagcctcccaatgtgctgggattacaggcatgagccaccacgcctggccttcttcttcttttgtaatcaccgcatagtgtttctgtagcagggcgagccgcagacaagaacccctcagacactgaattgtagaaggaaagggctttattcagctgggagcattggcagactcaggtctccaaaaaccaagctccccaagtgagcaattcctgtcccttttaagggcttacaactctaagggggtctgtgtgagagggtcgtgatcgattgagcaagcagggggtacgtgactgggggctgcatgcaccggcaatcagaacggaacaggacaggacagggattttcacaatgcttttccatacaatgtctggaatctatagataatataaccgattaggtcaggggtcaatctttaactaccaggcccagggtgtggcaccgggctgtctgcctgtggatttagtttttacttcttttttctttggagacagaaattgggcataagaaaatatgaggggtggggccccccttattccatgtaaaaatattctccactgcgttcccccgttctcacgttcatacatatttgaatcgttcacagtttggggcgatgatgaataacacataatcatgccttccagtccttccgtattcatgtttttagttttaattttttggtcaaatattgaggactggccttgctagaccatagagtagtgtatgcttaacttgctaagaaacagacagctttccaaatgctcatgctgctttccccctccccagcaatgcctgagagtgtccgctgccccaggcctgtcagtaccagccagcggcttttcaaatgtgaggcatcggatgggtgtaaaatcgcatctcgtgtgcattttgacctgtgtttctctgatgactaatgttcgcaaggattctttcttgcacttattggacatttgcacatctttcttgttaaaaagttttgctaaaattgtttgcccattttattgtgatttttttttgtctttttgttattgagttgttggaactcttcataaattctatatcaagaatgaatatgtgaagtgctttgccatatgtacgtatatatatttacatatatatttcatatacatgtgtatatgtgtgtatataatatatatatgtagaatatatatattgtatataattttctagtatttgacttgccttattgttatctgaactttttatatggaaatgtttttgattttgaagtccacgttaacatttgttttgacagctagtgctttcttgtgacctctttgaaaaccctttttcctagcatttcctttagaagcattagagttttagtttctatatttagttctatgatggatctcaagctaatttttgcgtgtaatgtgaggtaggagttgagatccattttttcacattttcatccaattgtttcagcagcatttgataaaaagaccttcctggccaggcgcagtggctcacgcctggaatcccagcactttgggaggccaaggagggcagatcacctgaggtcaggagtgcaagaccagcctggccaacatggcaaaaccctgtctctaccaaaaatacaaaaattagccagacatggtggggggcgcctgtaatcccagctactcaggggactgaggcaggagaatcgctttaacccgggaggtagaggctgcggtgagccgagactgcagcactgcgctccagcctgggtgacagagtgagactctgtctcgatataaacaaacaaacaaacaaacaaaccgtgcttatcccactgaaatcactggtgtttttaatgagaatcagccgacacgatggcgagtttcttcctgtgtcccgctccgcaggtctgtatgccgcttcctaatgcaaacacagcgtcactgtgacattatgggaggttttgaagttaagtattgtgagactccaacttcattcttctttttaaagattgttttgtttgtttccaattcctttacttctccagctaaattttagaaccaacttgatcatctcaaataccaaaaaacccgttgctgttgcaatagacagctgaggcacgggaaagaccctggagagagcccctgtgccatgtgggcaattggagaaggctgaaggctgaagctggagttctaagactgggaaatgcctgctcactccagcccccacccccatcaccagactatggagcccgtgggaacaaaggtaactgcacccaccaagtctttgtctttcctcttttcttttctttctttcttttttttttttttttgagacggagtctcgctctgtcacccaggctggatgcagtggcccgatctcggctcactgcaagctccgcctcccgggttcacgccattctcctgcctcagcctctctgagtagctgggactataggcgcccgccaccacgccctgctaatttttttttttttttttttgtatttttagtagagacggggtttcaccgtggtctcgatctcctgacctcgtgatctgcccgcctcggcctcccaaagtgctgggattacaagtgtgagccactgcgcccgacctgtctttcctcttttataaaatgcctgctgatgtctatgagttggttcctctgtttagttgttttctttgcttgctaattggtgtgagctctttgggttttcaaatgctgagccacggtcagctttattttattttattttattttattttattttattattattatactttaagttttagggtacatgtgcacaacgggcaggtttgttacatatgtatccatgtgccatgttggtgtgctgctcccattactcgtcatttactcagcaaactatcgtgtggtcagcttttatgttgcaagatcctccttggttcatcttttcattctcgcgaggccttcccttgttaaatgagaatccttgagtgtttaattttaacttatcaattcacccacctcttcctttagaattagagtatttggggccttatttaggaaatacttctctgagatcatgatatatttttctgtaaaagttgaaaacttttgtcatctgttttaaaatcttgaatcaggtatatgtgatggttaattttatgtgtcaatttggctggatcccagggtgcccggatatttggctgaatgttatttcttggtggtcggtgagggcagtttctggatgagaccagcattgggatcagtggactcaggaaagcagacgccctccccaatgtgggtggcttcctctgatccactgagggcccgaatagatcaaaacgtggaggaagtccctttctgcctgaccgctccagctggcacatcggtctcctgccctcggacttacactcacaccgtcagctccctggttctcgggcctttggacttgaacagaatgaccccgccggctttcctaggtcttcagcttacagacagcagatcatggagctgctcagcctccagaatcgcatgggccaattcttcataatcatctgtgtatctgtgtatctctctctgtgtgtatgtatgtatgtatgtatctatctatctatctatctatgtaactatgtagctatgtatctatttatctatgcatgtatctatcatctatgtatctatatatgtatctatccatctatgtatctatctttgtatctatgtatccatgtatctatctgtgtatctatgtaagtatgtatctatctatgtagctatctaactatgtatctgtctatgtagctatctatctacctatcatctatttatttatgtatgtatctacctatgtatgtatctatgtgtctatgtatctatctatcatctatgtatctctatatatatccatctatgtatctatatgtctattatctatctttgtatctatctatccatttatgtatctattatctatgtatgtatgcatctatctatctatctaatctacctatgtacctaatctcccactggttctgtgtctctggagaaccctgattaatgcagtatagatttttgtgtattcgtgtggaaactgcctttctcggcatgttttcttttccagcccctcggtcacccagtgtcagtcaggatggcctgggttgtgctgcagcaacaaaccacaccaagatctcagtagctgagtcaacccacacctcccaccaccacaagacacctggggctctgcctcttattccataacccaggcagccagttgctgtgacagaggaaaagaaaaatatactattcataatagaattcagcagtatattaaaaagaattttggcttacaggcatggtggctcatgcctgtaatctcaacactgtaagaggccaaggcgggaggatcacttgagtccaggattttgagaccagtctaggcaacttagggagaccccatctctacaaaaaaaaaaaaaaaaaaggcatactgatgtgcacctgtggtcccagctacttgggaggctgagttgggaggatcacttgagcctggaagatcaaggggacggtgagccattattgcaccactgcactccagcctgggcaacaaagtgagaacctgtctaaaaataatagtaaataaataataaataaaataactttgcaccctaaccaaaatatttacaaaccacatatctgacaaaggactggaatatacaaatctagaccatgtaaagaactctcaaaacacaacagcaaatcatacataaacacaaaaacaatccgatccaaaaatgggcaaaagacttgaagagacaattctctgaagaggacgtacagtggcaaataaggatgtgagaggaagtttgacatcctcagactttaggaaagacaaactaaccagtaatgcgatatcatgatgcccctatgagaatggcttaacaaaaaaatagcagcgacaccaaatgctggcaaaaggcagagaagctgggccactcgtatgttgatggtgggaatgcaaaatggtacagccactctggaagataggttggcagcttatgaaaaaaactaaccacacaaccgccattcaacacagcaatctcactcctgggcatttatcccagagacatgtgcacacggaaaacctgtccacaaatgttaataggaggcttattcatgatcaccaaatgctggagacacccacatgtcccttgatgggtgaaggggaaacacactggttcacctctgccaggggacacgtctcagccatgaaatggcaggaatgacagacgctcgatgacccagatgaatctccagagaatcatgctgggtaggaaaagccagtcttaaaaggttacacactgtgtgtttccattcatggagcattctcgaaatgacaaaattacagaaatggagaacaggagggaaatgtgggggctgcatcagggcaacgcgtggggtccttgctagagaaatgatctgtattgtgaccgtgccaaggtcaatatcactgtgttgttatgttacctgcattccagatgctgtcaccggggacatgggaaagggtacatgagatcccctttgtgtcttcttacgagtaacttcttacgagtaacttcttatgagtaactgcaggtgaatctacaatcacccgaatataaaaagttaaattgaaaaaagagtgcatacctcacagatactcagggagtcatgtttataaagtgtgtgggagagtagctggaatgcacgaggtgctgtcaatatcgggtggtggcagtgaaggcggtcattggataaatcaccaattaggcaattggcgaatcagattccaaatacttttccaaggtagaaccttggagatttgctgttggattggatgtggagggtggaagaggagtcaagaggatgcccaggcttctatcctgagccctgggaaggatggagctgctgtgaactacaatggggaaggctgggaaggcgttggttccaggggaaggaggaggagttcagtctgggatgtgcttagtttgaaaggccagatgtccatgagaagcaggcacctgggcctgtgagtgtggaacctagaggggaaggtgttgtgagagacatggaggaggtcgcaggtgagatagagaccccccggctgaacctggcaccgcccagtgctcagggcctggaggaggagaattaagcaatggagactgaggtggagtggctggtggcacagaaaggaagccagggctctgcactgggctggctctgtccctacatagatagatagatagatagatagataggtacatagatacatagatacacacatggatacatacatggatacatagatacgtagctagctagctagatacagacatacatacatacacacatacatacatagatggatacatagatacatagatagatacatacatacatagatggatacatagataggtacttacatacatacatagatggatatagagatacgtagatgatcgatagatacgtaaatagatacatagatacatacgtacatgcatacatagatggatacatagatacatagataggtacttacatacttacatagatggatacagagatacctagatgatcgatagatacatagataaatagatacatagatagatacatagatgattctgaagaattggaccctgcaattatggaagttgagcaactccacaatctgctgtctgtaagctgaaggtgtcccctgcttgtttccagactgagtctggttccccgatcactctgaccagagattcatgctaagatgctccctcggtgaccactccacaaccagccaacatctctaggctccatacagggtctccctgtgctcattgtaaatcatcaggccttcaaaatattcactagtggcagtggtgcatgcctgtagtaccagctactcgagagactgaggcaggaggatcccttgagcccaggagttcgagaccagcctgggcaacacagtgagactctatctctattaaaaacaagaagaggaaggtaaaaaagaaaataatcacaaacaagtaaacaagctgacaatgtcatttatttatttattttttatttatttgagacagggtctcactctgtcacccaggctggagtgtagcagtgcaatcataactcactgtagcctcaacctcccaggctcaagagattcttccaccttagcctccccattagctgggactgcaggtgtgcaccaccatgcccagctaattctttcatttttctgcagagacggggtcttgctatgtcacccaggttggtcttgaactcctgagctaaagtgttccttcttccttaacctcccaaagtactgggattacaggagtgagccaagcccaagctgactacttcttttttttttgagacagagtcttgctctgtcacccaggctggagtgcagtggcaccatctcggctcactgcaagctccgcctcctgggttaacaccattctcctgcctcagcctcccgagtagctgggactacaggcgcccaccaccacatctggctaattttttctttttttgtatttttagcacagatggggccaagctgaccacttccaaaagtgttctccactcaagcagctcgtttacttaacaatatcacttattcccacacaccccctcccaaatgtctttcatgtctttgcagaaccagctctcttaaatacattttccacagtcatatttacgatgcagattttaagtaaaattgcaatgcttgcaagaaaagaaacgtaggattctgtgatgtcactgaaagtgacattggagaacatctgctgggagccaggcaaggccaccacggtgaagatcaggcggttcaccctgaaagagaagctggtcaaggaggcaagatagaggcttcccaatggggtgagttgacctcaaagagaggcgtccgtgaaggatgagaaggagctcagttgtttttgctacgcgactcccttcagcgtcattctgtcacggccaactgtgaaatgaaggatgttgcagcaggcaatcctatgattttatcaaaaaattatgcataaaatgtccaacacgtgattttctctttgttgatttcatggagagttacaactatgtcttaaatcttgctaacaatcatgtgacatctgttcattattaaggaaggttttgggtttctttctctttctcttctacccccacaccacaagcacagacagcattggttctgttgggcctgtttccaacgaatggctggcggcaggctcttctctggtgcccattaccgtggtagtgaggccatctttgatctgcaggtcactgggtcctgcctgggccaaacacctccccctcttccctgcagaaacctcttcatcacacagcaggacatgaatttacccacaggagccacaggccaagcaaagagaacgccaagtgagccatggggggagaagtttccggcgtcttcttccggacccactgaccccacagcagcccctcctgccccactggccaggctggaggcagctaccaactccctacctcagtgtggtctgttctcatggaacctcatcaaagtgtacccttaaaaagggttccttttagccgagcacggtggctcatgcctgtaatcccaggactttgggaggctgaggcaggcggatcatgaggtcagaagatcgagaccatcctggctaacacggtgaaacctcatctctactaaaaatacagaaaaaaaaaattagccagtcgtggtggtgggcgcctgtagtcccagctacttgggaggctgaggtaggagaatggtgtgaacctgggaggcagagcttgcagtgagccgagatcgtgccactacactccagcctgggcaacagagtgagactccgtctcaaataaaaaaaagaaaaaaaaaaaattcctttcatttgagcttcaattgttctttgctgctcaaaagccttctaagtcttaccatttaccaggcagaactgagaactctgtagctccccaggtttctccaggctttctagaactttcctcctggctggcaaatcagccggttctttcgagctcaccctgttcttgtaatgctttgataaatgcagccacaacgacccacgtgggagtggcattgtgttttctgaactcttccctcagggatacacgatctgggacagtcttaccaaacacataataactacctttctcacctctaataactttcctttccacccaccctctgaccaataaaccaggcccacaatgctatgtttttgttctggtaggtttctgggtcaaccaggatagaccaattacgctgctcacacgcgccacccccacgtttcagtgacttcacacgacacaggcttacttcctgttcatatcccaggccactgcacgtcagctggtgactctgctctgtgcttcgtcactctgggactcagtcggaagcagcagccactgcttggaatgttggtggtcatggtaggagaagaaacggagaatgcagaagactgcagcaggtgcttcaaacttcttcccactgacgcaagcaaatcacatggccacacctgacttagagagggctcatggaagggccaccctaccacctgccatccaacctgttcccagaaggagaggagaaccaggatgcctacaaatagccctaattaccaccccattctgggctctgtgtggcaatgctgccagtcctatagataggtttttgcctaaatgagcttaagctttttttttttttttactccaacatatgcatttaaggctataaatttttctctaagcactgatttggctgcatgcagtaaatttgatagccccattatttcattaggggttacaaaatggttagcttctaattctacgatttcttctttatttataaactggaatacttcctctaattttttggttaccgtaagatagagtttctctatcagagatagaataagtgcctgattattttcctttatatagtcatcttcgaaataatgacttgattcctagaatcctctaaaggcaactaaattttacagtttgcatagtatctctattattatttgtgtatgtatgtgtgtgcgtatgattactcactcctagtttaaacatatttgatgtgtatcagtccagttaagaaattggtgttcagattgtttcaagtctgtctatacagagtttctccaggtttgactcttacctttttttttttctttttttgagacggacgagaggcagcggagacagccagccccatcctagcaccttccagcaacatcaccatcagactcacggagtccgaaatataacaagaataagaaaacaatagccatagccatagtaatgacaccgaacaacagagaaatcagcaagatatgtgtttcagtttgtcggcatggtatttttattagtttgcaactttctgtttaagataaagcagtgtgatcctggttaacatggtgaaaccctgtctctactaataataataaaaaaaaaattagccgggcgtggtggcgggcacctgtagtcccagctactggggaggctgaggcaggagaatggagtgaacccgggaggcggagcttgcagtgagccgagatggtgccactgcactccagcctgggtgacagtgcgagactccatctcaaaaaaaaaaaaaaaaaaaaaaagatacagcagagtgttggacatgcaaagccactccaaggaagcctcttaaacgcccaccttgttgcaggtgggacgcttatgcccagctgctccagctggaaaagacaggactgcaagtgggttcaggagctcaggcctctgaaaagatgagcaaaggcgaggctagtgggtgaggggtgattcagctgcaattgcagttgacttggggagagaatttgttaggagagacaatggacattaattagggtggactcttcttaggaaaaggcagccagatatggcatcgttctacagcagggaatggaccctgagcaatgatttggggctcaacaatgaaggacaggtcacagctttggaagacaggattagcaggactcacatgaggcctgagtccagagcctcagatcttacactggcagcacacagggacacagcaactagactgggagcagcagggattgcagcaactggactggcagcaggatgacccacaacctgaggaggagcagcagggcttacagcagctggactggcagcagtagggcttgcagcagctggactggcagcaggatgacccacaacctgaggaggagcagcagggcttacagcagctggactggcagcaggatgacccacagcctgaagagaagcagcagggcttacagcagctgcactgggagcagccacaagagccacagcctcctttggagcccccacaggagccacagccccccttggaacccccacaggagccacagccccccttggagcccccacaggagccacagccccccttggaacccccacaggagacacagccccccttggaacccccacaagagccatagccccccttggagcccccacaggagccacagctggagcaggaacaggctggcacacagcagcacacaggtttgcagcagcagatgggcacacagcagctggagccacagcccccacagccggagccacagcccccacagccggagccacagcccccacagccagagccacagcccccacagccggagccacagcccccacagccggagccacagcctccagagcagccacagcagcccatggttctggtggattgagggtggagcaggtagaggagcagatgagatggaggtgcaggtgtggagccccctgagcctggacccccttatatccctgggtagggttgctctgagaccttggtcactccatcattcccagcacttcctgggtatgtgattatttgtttgctggacttcgggttctcattggcctgatccaacacccacctgcttatgtttctaaatgtagtcacttcctccttggaactggaccttgtactgaactgatcacctgccttctgttttcctcatgtgatgggcagaggatgggttttctacaaagatcattttggttgttttcttcccatcttttcttcccacctatggcattatatttttctttgaaactgtgaactttgtgtgaagataattttttaaaaactaagctttcatccatataattaaagaggctaattgaggaaccaacgttgtatcttggttctgtcttaacacattggtgcactgcagtgaatctctcctccgccagcctcaggtcgtggggtgctcaggactcctggctgctgcatacacagcctcacgtggtgagtattgtttatgttaaaaatctcaggaatttcatgggtggatgggggatctcatttatcatcctgttgttaatctcttcaattaactattagtgagggtgattcttttactccaatataaattatatacttttttattggccaggcacagtggctcacacctataatcccagcactttgggagaccaaggtgggcgaatcacgaggtcaggagatcgagaacatcctggctaacatggtgaaaccccgtctctactaaaagtacaaaaagttagccgggcgtggtggcgggcgcctgtagttccagctactcaggaggctgaggcaggagaatggtgtgaacctgggaggtggagcttgcagtgagccgagatcatgccactgcactccagcctgggcgacagagcaagactccgtctcaaaaaaaaaaaaaaaaaatttatacctttttgacttctcattactgctttaaaagttatttggatattgagagaacaaatcccttgtgttcaaacagtgtactttgtttttccacaggcatgtacttgagtttaatttctgacgtttttaaaagccattctcactttgtcttaattgtcatttttagcctcgccaacattattagatggtataaaaatgaatgtctttcagccgggcgcgctggctcacgcctgtcatcccagcactttgggaggcccaggcgggcggatcacgaggtcaggagatcgagaccatcctggctaacatggtgaaaccccgtctctactaaaaatacaaaaaaaaattagccgggcgtggtggcagacgcctgtagtcccagctccttgggaggctgaggcaggagaatggcgtgaacccggcaggcggagcttgcagtgagccgagatcgtgccactgcactccagcctgggcgacagagcaagactccatctcaaaaaaaaaaaaaagaaaaaaaaaaaaaagaatgtctttcaagcttgggataaaggccttgtcttatctggaagaggcgagagaggggttataggttccgtcgttcccattgctaatgggagctgtggggcaggggactgagagaaacccacagagagggaagtgcctgctgtgctgaaaatggcttcttcctagggaacacactgggtcagaggatgcagccctgtgtggcaacagttcacgcctcccgactaggcgcggtgaggctgggatggggacacttcataagacctggattgtgagcacagagcccaggcatcctaacaaagctgtcccccaccagccctgcgcgaggccgcactggacatgagcagaccatcacgcaccccaggtgctcaccagagcttggcagctccgccctcaggtgctgggtaaagggaaccaggagcatcccattttgtttcaacataggtagaagatctagacaggattggccaaacccaagagaggtaacatgagattctgtaacagctatgaaaacaaaccttaaaaaacaaaaggaggaggaaaggaaggagacaaacctttctaagcaaacttgtcatccgggagacaaaagtagatttcctgcaaatggttgagttatgcaacaaataataacaaatatggcagcaaattacaaatatggcatactaactttaatagggctctcagttgagatggtaaaattatagagtaagttttattttgtttatttgtttattttttgagacggagttttgctctttcacccaggctggagtgcaatgatgtgatctcagctcactgcaaactctgcctcccaggttcaactgattctcctgcctcagcctctgaagtagctgagattacaggcacgtgccaccacaccccactaatttttgttttttttagtagagacagggtttcaccatgttggccaggctgttctcaaactcctgagctcaagtgatccgcccaccttggcctcccaaagtgctgggattacaggcgtgagcctctgcgtctggcctatagagtaagttttaaaaggaagagcggaggcctcagggaataaatgagcaccagaagtcattacagttcgagtcggtgattaggaagagtgaggggcagaacggaggtggctgggacttgggtcgctggcatccgagaagggcgcgagatgctcacagtgtggctaaagcacaaagccgtggaatcagccagagagaggctggcgaacggggaggacaggaaagctgcagcatcggtgtaagcagtggaggctttaacaaatggagcagaaagcagattcaaaggccagaaaaatgcaccatgacccgcaggaagatctgaaagtttagccccaaagagcgtaacatgctccaggaaagaatgaaggcggaatgctgagtactgagcccgtggtggtttggtgacagaactccaaaggctgaatcaacattgccgcttctgcaaatccctggccagtctgccgtggctgtcagggctgaggagggtgctcatagctagctgctcctagatgctcctcggagaggtcataaacccaaagataggggatcaatttctccaaaaaggacaaaaccaaaacatgacccaagaacatggtgacaaaacgtccttcaaatagaagaaaacaggaacacagcctccaaaatggcagaaatctaagacgacagcacctgggactcgggaaaatcatatggaccctacacaattgggattcattccaattaaaggagtgaggcagggataggcaaggcaggaagggctgaggacagtagaatgaagaccaacattgagtaattaactacacgggcgatggtgagttacggagcccacctgcattcccagagagaaaaattaacctgatgacatctctgctctccacctcctcaggccccttccacaacctccaggtgggtgggggttagagccatggaaggacccggtgacctagggcaggggtccccaaccctcaggccacagtccatggcctgttaggaaccaggccacacagcaggaggtgagtggaaggcgtgcaagcatgacctcctgagctgcacctcccgtcccttcagccgccacattcgattctcataggagccagaaccctactgtcaagtgcgcacgcgagggatctagggtgcgtgctccttacgagaatctaactaatccctaatgatctgagatggaagagtttcatcctgaaaccagcccccacccaccccctgggtccgtggaaaaattttcctctacaaaaccggttcctcgtgccaaaagaaggtggtggttgctgccctcgggtgctcttgaaaatggccctgcattgtggctgggctgctgtctccctggtgggcggcgatcctggcccctcaccacacccgtgggccagcactgtctctaccatctcgtgggtgctactgtttccatacttttcttatttttatattttccttttcgtaggcttttagattctcttttcttgcttctatggacttgctgaagcttctttcttcctttctcctctttttctgctggtttgcactgatgtttttgtttctacttttccccagtggtgactgtgaacattttaacatgcatgtttaacgcagtctgagatcagccactatcttcccctggcccctcacagaggcaggtgctcccctcagactagcatctcctgtgtcaacctgagtgccgtccagtgtttcagatccgcctccttcctgtacccccagcgagtcatgagcatcctacccttcatttcttctttatatacagcacatttaccttcacgagaacctcatacttccttccggaaattatcaatttgaagaagacacttctgtccctcagctcatggtcaggcacgccatagctaattgttacacctgctgaggtggacgtgtgaattctctccctcaaggcacttttgtaatgagttacaatgatacatttcctgacggtgagccatcttaacattcttggaacaaaccctacttatgacttgctatttttaaataatcatattggagtctttaatatttgattcagaaattgtgtgtatttgttaataacgaaatgaagttaaaattttcttgtgttttactggccttacctttttcttttttcttttttttcttttttgagacagagtcaagctctgtcacccaggctggagtgcagtggtgcaatcatagctccctgcagcctcgacctcctgggctcaagaaatcctcccacctcagcctcccgagtagctgggactacaggtgtgcgctcacaggcccagctaatttttgtacatttttgtagagatgagatatcactatgttacccagactggtctcaaactcctgggctcaagtgatcctcccacctcagcctcccaaaatgctgggattgcagatgtgagcacccacacacagcccttttcattcttctctgtcaggccccaaatgttcctgggtggttctggctgggggtctgaggctgcatcccctgaaggctcggctggtattggacccacttccaggatggtacatgccttggcttgtgggtgggaggcctcagcttctcacctgcaggcctctccacagggctgctattggcacaggatctggcttcacccagaaggagtagtactgagagagagagagagagagagacagagagacagagagagacagagagagaggcaagtgttgtaccacccttcatgtcctagcctccaagccccgtgccatcatgctgtctgccgtcttcgtcgcgagaaacatactgtgctgctggccttctccttgttgcttcttctgcaagtccttctgctggagccttctctgctgtgcggcatcagccagcactttactatcccaggaaaaaccgcccctgagccttcctctcatctgagtgtggtttcaggtggtggaggagtgaaaatctgtggggtcagcctagctcgttttaggaggagaaatccttccagctctctcttacctggtgcccccttttctgttgggttcttgatctggagcctacagatacaggtggacatcagatcctgtctggatactgcacagttttatgtaaagttgtgtgtttttgtgcatgtttgtagacttgtttaaagagaggctctgtaaaattccacagaggaatctacgaacccacagtagttaagaatgggtctgcagaggtagttcctaatgtggagcacaggagcaaagtctacaacatactcatgtctgctttacgctgaaaaggtgaaaaaaattaaaattaactaaaattaaaatagcaaatgactagacaggagcatatgcaccttatataatacacacatttcagggggcatttgctcaaaagctacataatcgtggggtgccccacgggacagggtgagaccactgccatgttgattgttccatcagagcattgtaagaggccctctgatgatcctctttgcccaattcagcgaacccgaaggtcatcaatggaccacgaagaacaaaggcccatgaaagggaagatgttcccaaagtacaaaaggaaaagtcctcttgtacccgagggaaggagctgatccaagggtgtcactaggagtcagcgcgggtgttgatacattacttcaggggctggaggcaaatatacgaggtactggaagcaaatgtatcaagcactgggacaaatgtatcaggcgctggatgcaaatgtatcaggcactggatgcgaatgtatcaggcgctggatgcgaatgtatcaggcgctggatgcgaatgtatcaggcgctggatgcgaacgtatcaggcgctggatgcgaatgtatcaggcgctggatgcgaatgtatcaggaagcaaatgtatctgttgcctctgttccagagctggaggatgccgcctctggtggggacagccaacacaaggcggctctctcctaatgggttttctgttcctccctgagatacagtcccctgccccagaacagagtggggctccagcatacacggcaagagtcaccgagtgccagctggtgtttacaccgtggcctgaggcctgttgactgggctcggggcactcacaggtattgtggtcacgggggcaaatggccatccggttccctgctctccaccggctttctttagcatccagtgggcctgcacccgaatgtagttgctgcttcccaggctgagcccgggacccggagcaggcgggcacccagacagggcatcctcttccgctcactggccctgaaagggcctctgccatcagcctgtgccgctgtccgggagcccctgggccggccacgcagtgggggaacccgcttcacagcgacaccgtgcggcggcaggaggaaccgctgcaggagacaatgcgatctgggtcctgacccagcgcagaggcagtgtctgccccttgcaatgcttggatttccttcctcaaaaggcagccttcgatgatctgaaattcaagttccagcaggcatcctgtactgtatctgtcagccctgccacccgagtggtctgaaagccctggaagagaccgcggttatcacaggagaacactttccatggggagcacgcagcaagctccagaataagcgcttaaaatccccgtctcagtcaacactgcaaaccttccaacaaagtcttacaccgaaaacgaccctgctgagctgagggctgaagccccaggtcctgggacccttggaaacagcccgcgggccaggagctgctgtggaccgtgaaggtgtagggcctaggcacgtcccaagcaagacacgatgctcccgcagaggaatcttcccgggagcaagccaggagtcctgggctcaaaatcaccctcggcaagaccaaggcctctgagcgagccactgcctgcccatcgcttccttcttgtcacatggaaagggaaactcaccgcggggccagtgtttactgaggggccgcttccatcacagacctgacagcacattcgagaaaagtgcgaggaaaacaggagttatttataaaaatgtaaagcagaagagaatactgggaccagtggcacaagcaggaaccaggaagtgacagtgtgcccagcctctcacctgaccctggacagggatataaagagcccgggctcagggggctccacacctgcacctccctctcacctgctcctctacctgctccaccctcaatccaccagaaccatgggctgctgtggctgctccggaggctgtggctccggctgtggaggccgtggctccggctgtgggggctgtggctccggctgtggaggctgtggctctggctgtgggggctgtggctccggctgtggaggctgtgggggctgtggctccggctgtgcgggctgtgggggatgtggctccggctgctgtgtgcctgtctgctgctgcaagcccatgtgctgctgtgtgccagcttgttcctgctccagctgtggcaaagggggctgtggctcttgcgggggctccaagagaggctgtgtctcctgtggggtgtccaagggggcctgtggctcctgtggggggtccaaggggggctgtggctcctgtggggggtccaaggggggctgtggctcctgtggggggtccaaggggggctgtggctcctgtggggggtccaaggggggctgtggttcttatggctgctcccagtccagctgctgcaagccctgctgctgctcctcaggctgtgggtcatcctgctgccagtccagctgctgtaagccttactgctgccagtccagctgctgtaagccctactgctgccagtccagctgctgtaagccctgtagctgcttctcaggctgtggatcatcctgctgccaatccagctgctacaagccctgctgctgccagtccagctgctgtgtccccgtgtgctgccagtgtaagatctgaggctctgactgcagactgcaggtggcctgactggtgaagggcccggctgcccagcttccttgccctgggttctctggtgctccactgtctccactgtgtcctcactggcttcatccactccacaccagtgctcccgaaactgactgaggaccccttctggctcattgcctactacttctcctgaacttcctctccctgctcctcactcatttaagatccaaagcggcccactgaggccccagaggcagatcagaccccttagaccctgacagctgctccttctttcaggagtgtgatcgaccctcaatctctctggctgtctgtatatcaagactgaatcctgaccctctaaataaacaaagtctctaagcacaaagctcactgtcttgtggttctctccttcccacctctctctcattcccagaagcaccatcttcttgcctccacccctgggcctgttcccatttctctcccctcagcatctttcatgtcatggtccatgtcttcatgcacagaactaacgtctatagctttctgctctgggccccttgttgtgttgggctccagagatgacagagcagagtaaatccaagctcacagtctggtatgtggggagaggtggggagagggaaaggtggtgagggcggtggtgtcagccgtggaggcactgccgtcccgtgggagggagggaagctcagggccaggccacttcagcggaaggatgaggaagggtctgtatgctgagctgtgcggtacatcaggccctaagaagcccctagtgcatgcaggagccagacgtggagatgcggaggagcttgggcttatctgcaatctcacagggccttgaaaaaccagacaggagaaggcaggactgcacacaacgccagctgcgggacacaagctcgaaggcagccgggagttgaatagatccccacctccaaaaaaaaattccagagctgggggagcccaaatgcccagtgccttctaaggcaacctagcctggagacaagctttctttcagcttttattttgggttcagggctgcatgtgcaggcttgccatatagatgaattgcatgtcatgggggtttggtgtatagattatttcatcaaccaggtaatgagcatagtacccaataggtgactttttgatcctcaccctcctcctgcccccgccacccccgccaaatgcaccacagtgctgttgttcccttgtgttcctatgtactcagtgctcaggtctgactcataagtgggaacacgcgatatttggttttctgttcctgcattagtttgtgaaggatattgacctccagctccattcatgtccctgcaaaggacatgatctcattctttttgatggctgcacagtattccatggtgtataagtaccacattttctttatccagtctgtcattgatggacattaggacgttacgtgaagatgaaggtagaggttggggtgatgcttctataagtcacagaggaccaagggttgccagcaagacccagaagctagaagagaccagaacagaggctctgttgcagccccagaaggaaccagccctgcccacccctgcatctcagacttctggcccccaggattgggagagggatgtttctgtcatttgtggtcctttgttagggctgccccaggaagcgagtacaagcggtggctcagtcagagcaggaaaagcagtcattcagggtattttctgtcggggggatctagagtggaaatcagaagcttatgttctcgatggcagctctgggacctggacttcctggaaggactccagctgtccacagcaggggcccctggagacctcaggtttccaagctgtcctggaaccctgagctccagtgcacctgccatgtggtccagggacagggagccacctcaccgccacctctgccacagccacctcagggcgtccacaggctggtgacagcactggggtgtgcgtctacccaagcctttctctggggaagcaggtgaccagctgcagcggaagccacaggtgcacagctcgccctcatgcgcagcagcacttgagccctggcatgggcctctgcctgccttcccttccagacctggggaaaggcattcgattggcaggacctcattctcaccctggccttggaattgacatttttatcttctagctcatgcagtgtagacaggaccggaggagggggtggagactctgtgggtggggctcgcctacttcctgccttttcccccctcaattatccccccactaaggcttctgtagccctgttactgtacccagggagggtgtccaggatcttggcttctcaaacaaagaattggacaaaacgcacaaataaagcgaggagagcaaaagctgggatttattgagaaggaaagtgcactccacagtgtgggagcagccgagcggaattcattgcaaaggagaaagaatgttgtggaagtgaggtgcagaacagacaggatgccctgggcgagacagggtgcagggcgggctgctcacaaggatgagaagcagagaccggcctgagggaggctccctttatgggactcttccatgattattcctaaggagctgggaagaggtgttgctaggaagcatgttctgggtggtcctctgggtgcatgtgtgcagtagctgtacacgcttgttcataccattcatgtctcattagcatcttaaatctccacccagagatgtgctttatactattataagggccccgttaaagagtttttgtgagtttaaataccctgtactggaggtccgccctatgtaaatgaagagaatgaagttacaaagtcatttgttcgctgtgtgcccatggggaggacatgtcctgtcatagctgaagtgcgaatccgccttatgttccctgcctccagaccgtattttcctgcctcagtcccagagcctgctgcatgggcatgcagctcccacaaacacacaagttcccacacttagaaggcttcatgccttgctgtcactgtcttgaaattctctgctgggcgtggtggctcatgcctgtaatcccagcactttgggaggccgaggtgggtgaatcgcctgaggtcaggagtctgaaaccagtctgggcaacatggtgaaaccccatctctactaaaatacaaaaaaattagctgggcgaggtggcgggcgcctgtggtcccagctactcaggaggctgaggcaggagaattgcttgaacccgggaggcagaggttgcagtgagcagagatggtgccactgcgcgccagcctgggcgacagagtgagactccgtctccaaaaaaaaaaagaaaaaaaagagaaattctaaataactttgtttatcagcttgggctttgggggcaaatctggtgggacaggggagtgtgcacacgacaggggttgcaccaggggcagtgtgcacgcgtgtgcatgcagggccctgggcacggtgggcagcacagacctggctgcgtggtgtgtatctgagggcagtccagggcaccagggggaggctgggctggaaccggggcccaggaaggagttggcagcggtagaagggcagtcatggcagctgcggctcacggggaggagagaccctgcgcatgtcagcagcagcccagggtgggcagctggctggtctgtctgtccccagagcttggttccccagcacctgctaaatatgtgcttcccagtccagggctaggaaaggagctgccaagctcaggcggtacacagtaaattgttacagaatgaaactgtgtatatggacgttagcatagagcaaaccagggggttattagaattcctcaaacacttttgaacctttagatttggaaaacggctgcaacattgcaaagcaaacatccacaagacaaacttagaaattaaatgtaaaggaaatggctgggcacagtggctcttgcctgtaaccccagcactttgggaggctgaggcaggaggatcacttgagcccaggagttggagaccagcctgggcaacatagtgagacctggtctccatgaaaaataaaaataaattagccgggcccggtggtgtgcacctgtagtcccagctacttgggaggctgaggagggaagattgcttgagcccaggaagctgaggctgcagtgagccatgattgtacccctgcactctagcctgggcaaccaagtaagaccctgcctcaaaaaccaaaaagtaaagaacattgtagttgatggaaaagaatactattttcaaataaagcttcaggtgaactgatgattaaagggtaagacagggcaggcacagtggctcatgcctgtaatcccagcactttgggaggccaaggcaagcggatcatctgaggtcaggagtttgagaccagcctggctaacatggcgaaaccccatctctactaaaaatacaaaaattagctgagtgtggtggcgcacgcctgtagtcctagctactcaggaggctgaggcaggagaattgcttgaatcagggagggtgaggttgcaatgatgcccacggtgatggattagaggtggagatctcattaggaactcacgctcagcttcgtacagacacagatggtcacacacaaacacctgcagatgtgtgcagacgtggttaggatgcacacgtatgtcctgttgctctgtcagtggagagtgttgacagctgttgtgagacctcggttcttgtcttcttagtttaaaataatttaaacaagacacacaggagatgcagcacagaggaattcattgcaaaggagaaagaatgttgtggaagtgaggtgcagaacagacaggatgccctgggcgagacagggtgcagggcgggctgctcacaaggatgagaagcagagaccggcctgagggaggctccctttatgggactcttccatgattattcctaaggagctgggaagaggtgttgctaggaagcatgttctgggtggtcctctgggtgcatgtgtgcagtagctgtacacgcttgttcataccattcatgtctcattagcatcttaaatctccacccagggatgtgctttatactattataaggagcaaagggtcagagtgaggacaggtaaaatcaaaatgtgcatgctctctacgggggaaattccctcctgagatagctttgttcgaatgagctcaatgacaacatgaatggggaggcttgttgccttggcccagtggtcactacggttgctgcgaggagatggccacttccttgacaacctctcctgcctcaagagggccccaaacctatggcaccccacagcagcaggaggttgaataccaggctccaacccaaggaccagggacccttggagacatggcaacttctaggactgaggcaaaaaagataaaggtgagtctggagcatcttgtagctccagaaaaaaaaaatctaaaagaaaacaaagcaaagccccgatacatgcagtgatggaaagtatcagaagcacgttgtagggacacgtgagccaaaagaaagcgctcctgggggttacaaatagaacaattcgatcaacacaataaatagagagagtagcattgactctaacccgaactgtaaaatagatatccatgaacatgactgatagaaataagtgatttagtaaataaataaaggaggatcacttgaactcgggaggcagaggttacagtgagccgagatcgcaccactgcactctagcctgggcaatagagcgagactccgtctccaaaagaagtaaataaataaaagtaaataaataaatgggagtggataggcaagtcccccatgcagaagagttcccactaattctgtgtagccctcaccccttaagtgcaggcagcactgggacctccttctgagaatgcagcacgggacaggggaattcaggagcatctttccgtggggaatcctgaaagacacaaacacagccaggagacgggggcagcatagcccgcgaggcacgacgagccatgccaacaggacaggccctcagcatggggtgacgagaagggcatctccctctgtgctcttccttcccacatccacagccccgtctaatcgtgaaaacaccagacagatcctaataagggacaccctacaaacacctgagcagtcctctgaaccctccaggtcaccaccaacaaggagagcctgggaaacggtcaccgcccagaggagcccagggagacggacaagggaatgtcacgtgggaccctgggtggggccctgggacagaaacggaccagcacgtaaatgctaatgagagaagaacaaagtgtggactttagttaataataatgtatcaatattggttctctattttattttattttaattttttttttgagatggagtctcgctctgtcacccaggctagagtacagtggcgtgatctcggctcactgcaacatctgtctctcaggttcaagcagttctcctccttcagcctgctgcatagttgggattacaggggtccaccaccacgcctggctaatttttgtatttttagtagagacggggttttgccatgttggccaggctggtctcgaactcttgacctcaagtgatccgcctgcttcagcctcccaaagtgctgggataacaggcgtgagccaccgtacttggtcattatttagtttttagtttagtttagtttagttttttcttcagacagagtcttgttctgtggcccaggcaggagtgcagtggtatgatctcagttcactgcaacctccacctcttgggttcaagcgattctcctgccttagcctcctgagtagctgggattacaggcgccagccacgacgtccagctaatttttgtattttagtagagacagggtttcaccatgttggccaggctggtctccaactcctgacctcaagtgatccttccgcctcaggctcccaaagtgctgggattacaggtgtgagctaccacgcctggcccaatattggttctctaattgtaagaaacataccatactgaagtaagatactaataatgggggaagctgggtgtaaggtgtatggaaacttgctttgcaatttttctgtaaatctaaaacaattccaaaaataaagcttattaaaaaataatttagactcccatgaaactgatttctttgaagaattaatttttttaaaaaaaatttctccacaagaatcaccaggtctacatgcgctgacatttatcatttaaaacaatttatcagaaactaatcctaatgttgtcacagcctgtaagatacctttactgctccaataacagctgtatcagcacaaagattcttctcaaaggtcatcaaaaattatttgagatcttgcatttgccaaaaaagactgaaataactttcagttatgtcaaaaccgaaaatgaaatttctgaagtatccattttgatgatctaataaatgaatttgcagaaaaaattggaaaaatcataaacatcctattaataaaatattatttattatataaaattctgaatccaaaaattattgttttgtagtttgtaaattggtgttgttacttggcaccactatcacccctatttattgtgtaagtgataaaatcattcctaaaggggaaagctttcactgtggttttttgctgctttttttttgtcccaagacagagtcttgctatttcccccaggctggagtgcactggcacaatcttggctcacggcaacttccacctcctaggttcaagcaattctcctgcctcagtgtccggaatagctgggattacaggcacacgccaccacccctgattaatttttgtatttttggtagagacagggtttcaccattttggctaggctggtctcgaactcctgacctcgtgatctgcccacctcagcctcctaaagtgctggggttacaggtgtgagccaccacacccagccttttgctaccttttgaaccaggagtcccaccatttctgtgtctggcctatctctctccctctccagggcccagctcctcggacccctcccgggtcctcacctgaccctgccacactctcgcccccgaccctgggctgggctccaccacaggctgctgacaaataaacaagagattggcaaatcagacccagcatcagatttgcacaatgatgcatcgtggcaacgaagggttgacatcaagaaagcaaatgtgcctgatattgtaaataataccagacataaatgaggctgcatgtggtggctcatgcttgtaatcccagcactttgggaggctgaggcaggtggatcacctgaagtcaagagttcaagacaagcctggccaacattgcaaaaccctgtctctactaaaaatacaaaaattagccaggcgtggtggcaggtgcttgtaatcccagctattcggcaggctgaggcaggagaactgcttgaacccaggaggcagaggttgcagtgagcccagatcacgccatagcactctagcttgggcgtctcaagaaaaacaacaacaaaaaaccaaaccaacaataaaacactcaccgtagtaatgacagacacgggggaaaacatcatctgttttctccatgttgcggaaaaggtattaataaaccatcaatgcctgatacagtaacaatagaacggcgacagatggagaagcccttcatacagtataaacacaggcacgcccataattaggttttcctgcaaatgtgcacgttcatatctaaagcgaaatcacatctctattcggcaccatgccaggggcggaaggcgcctgctctctaagacaatggttttatagtaacgattgcagcctccacccagagagcttcaggggcctgagctaggggctgtgctgaggagggggctccggtcacctgcggtgtctcccccacccctcccaacgcccaatctcctccagctaggcctccctctcggaccccgggccttgcttgaaccaaatggttcgacctctgcctcttcctaaggctcattcctgagctgggaagagaaagtgaggaaattccttgcagaaaaggagaaatcagtcatcaccttgtgtgttgtgtgtgaggctctcccagcccgtggaggcgggaccttttattccctcgatttgaaaggcaccaaacgcagattctctgcatgtccaaacttttttacaaatggaagaagaatgcataagagcgtaaagcatagcttgcaccccaatacacttttggcttcttgggtttgggccgtctcgatctgagcttgcaccctgctcttcatttccttcttttccccaagctggggggcaccaggctgcagccgtggtcatcgtcccagtgtgaacccccgaggcctgcacagctgcaaccattttctttgtacttaaacacaaacgtttatgttcgccagcgcccgtgtaaactagcagctccctctttccgtctccttgcttgcgttccttcgacgtgtcacctcacagacgccccttcactgtgtcacctcacagacacccctttgctgtgtccatccctccccagaaggttggagccctgagaacaggtgtacctggttttggtcattgttctaccctctggttcaatgacagtgccaggcacatagtgcacacacagtaaatatttgccaaatacgtgcagggctccaagccatcctgagcagctctgggcagaggggctgaaagtctcacctttccctcccgggtttcagggaagagcccagtctgggaagacaggaagccggcttgactcagcagggccgccagggggcactgtggcaagacggcgggagagccgtgtgcccagggttgcaggttctggagcccagaggtggcccaaggcgccaggtgtctggcaaactccaaccgcggatgcaggcgacagccccagtctccaaagattgagtggctgccactggctttaggataaaaatgaagcgggacccttaaaaacacccaaacatggtagaaatacgtgaactggacgggatgcacgttgcgttttgcattttgctttatagcctgcagcagagcaatgcagagggctccaggctcaaacaggctccgtcctggtgtgtttggaactcggggagcagaggagggctgcagggggaagagggcatcgggagaaactcttaaagggagggtcttcccgtgctgtgcacagcccttagtcctgtgccagcggtgggcagctttcatctcgcatggagccccccccggccctagctcccctgcagtgcccagtgcagccctggcatcccgccgggctcccccaccggcccgggccacttccatcttcccacaggagtgggagcctcagggaaggggcttctcggaacttcgcccactgtcgtccctctcgctggacctgcagcttgggccctgcgtgtcttcttatccagagctatttcttagttcctcagccctctgcttgtggttaataatgtttctatttcctgaaacttttctttaatggattgattgaggcctgtagccatctcattttcctggggagttggtcacgcgtgggggagtcccagacacgtggaaagtggctgtagtaactcctgccggtacctggggaagtggggaagaactgccatgctcagaaccgtccctggccactcccgagcaccctcagccttcacctgcctcttgaccctggcgtctctgtccagccagagccccaggagctgcctgtggttgaaaggttgggctacgactcaccacgtggccacacacaccacgggcaccgcggggtcgcaggaggagcgtcaggaagaccctctgtaggactgggctgtggctgggtggttgggggtcaccccgggttggaggctgtcagaaagctggagcccgcatgaccagctggcaaaagtctgaccccaggcaaggcccagctcctgttagcagagagaaggggaggtttggcatttcatggctggcaccgggatcttgatttgtccgtgtttagatgaaattatgaaagggcctcgttctgtctcatctcatcccagccttgaagttgtctgaacttgttttcagctggaatgcaggcaaacaaaccacttccagcccagaccacctccactcccagaccacctccacccgagaccaccccaccccataccacctccaacaccagaccacctccacttgagaccacctccaacctcagaccatcacaccccagaccacctccaccccagaccacctccaccccagaccaccctaccccagaccacctccaccccagactaccttcaccccagacaacctcacccccaggccaccgcaccccagaccacttgcacccgagaccaccccacctcaggccacctccaccgcagatgtcctccacccctagatcacccatccccagaccacccccaccctcagaccatcccaccccagaccacttccaccccagaccactccaccccagaccatctccaccccagaccacctccacccgagaccacctccaccccataccatctccaacaccagaccacctccaaccaaaccacctccaccccagcccatcccaccccagaccactccaccccaaaccacctccacccgagaccaccccaccccataccatctccaacaccagaccacctccaacctcagaccatcccaccccagaccacctccaaccaaaccacctccaccccagcccatcccacccaagaccactccaccccagaccaccccaccccaaaccacctccaccccagaccacctccaaccaaaccacctccaccccagcccatcccaccccagaccacctccaccccagaccacctccaccccagaccacccttacctgatggaggttttggggctctggaaagctgccttcaaagttctctccagcctgggccccctggcccgccccctccactggcgtttacccactgctgcctctcgctccccaccgggaccgaggacctggcctccgctccgcagctggggaggggtcttccttagggcactggcaggaggcccggggtctgtcctggctcttccctggttgttcctcatggatcagataattctctcctgcttcttccccgacacgaagcaataggctcatatccagcagctcagaggcacggtggggggtagggggttgaggggtgtctcgcacccctgggcccaggtttcagagaggcagaatctgccactgcggctgtgcccacgtccaccctgaccccgaccctgaccctgggcatgaaccggcagcaactcgctctcaggagggtggggaccgccgggacggacctgttccctccttccctccctcccaggggagctgaggcagcaccctggacccccgagctgggggtcggcagcgccgtgaccccatctgccccatttaccatgggctgcaagatggggctcctcctggggtcctccacgtgtgtttctggggcagcacatcaccggagtccaggacaggctggggaggcaccagtagccccagcacccttgctgcaggcagggcaaccgctgagactccaggggctgcaccactgccctgtggccgggcccctcccctccttctccaggtccctccaaaagtgctggggatgggcacgggggaagtgacaggactcctggctctcccttcagtggctgaggacccccagtgcccacaggttcagagagggaggtctggcgggcgctgcggggcagccccgacctggcacccaggagaggagccccttccgcgtttcgacgctcccacccacagcacagagagacccgccccagcgctggacattggggtggtcagtgtgtccggccgcaggcacagctgcactggtggctgctcctctgtcctgttttcctgcccatgtgacctggagccgctgtgccaggccttccaccaccaggttggggaaacagcagcagaaagaacccccgagatgcccgacaagcagaggggactcctgaggatcagggaactgccagggctgcgagctctcccagttgggggggatcctcacccacaattcagctcctgtctcccggcacccccaaccaccttcacattgtcaccagcaggggcctgatacccaggtgggaggttcaccccagaggctgcagtctctggcaagacggggtggggtgcatgtgggcggcaagccgcccaggtgccgaggcaagagaccgagggcacgagctcttccagtgtaatgaagaaaatatatacaataagaatagttatactagatatagatcatagatatgattatatacgaacattattaatcattagtttgtagcaattactctttattccaatattataataatcctcactgtataatcataacctaggaaaaaccaggccatacagagataggagctgaggggacatagtgaggggtgaccagaagacaagagtgcgagccttctgttatgcccagacagggccacccgagggctctttggtctagaggtaacgccagcgcctgggaagacgcctgttacctagcggactgtggtctggcggtaacttcagtgcctagaaaaggcacccgttacttagcagaccgggaaagggagtctcccttgccccgggggagtttggagaagactctgctcctccacctcttgtggagggcctgacatgagtcaggctcgcccgcagttatccggaggcctaaccgtctccctgtgatgctgtgcttcagcggtcacgctcctagtcctccttcaggttccatcctgtacacctggctctgccttctagatagcagtagcaaatcagtgaaagtactaaaagtctctgatatgcagaaataatggcgtaagctgtctcctctctctccgcctcggctgccaggcagggaagggccgcctgtccagcggatgcgtgacccacgtgaccttacctatcattgcagacggctcacactccttaccctgcccgcttgtcttgtatccaataaataacagcacagcctggcatttggggccactacctgtccctgcgtcttggtggtagtggtcccccgggctcagctgtcttttcttttatctctttgtcttgtgtctttatttctatgatctctcgtctccacacatggggagaaaaacccacagaccctctagggctggtccctacaggtgcaaaaggtgtaggactctccccttccccagagtcacagggaaccccggggcgctgctttgttgcatgagcattgtccagaggggtgtgggggtaggagtgagacatgacggagcccggcccagctcggcgacagggtggtgaggtccagggtgccaaggttttaaggcacccaccctgaaaccgaggctctgggacccattcaccatgatgtgagtgaccctcagggatagcagagtgtggggtggacccgggcggaatgaggcaggtgctccagggacccccataggacacctggacacctgtgtctccccacatgcgccagcttcagtgcctgggaggggacacccctggctgccacggggaatccactaggaggctgtggtgtagagaaaatgatacccctccctgctccatctctctggccagcgcttctgcagagcagcagaggggctggggtctctgggcacggccatgcagagtgggctccaccaacacctccggcttctgctggaggcttcctccccttggcccgtcgctcacccctttcctgagtgacacagcaggacagggggtggtgggccagtagggaaggctgcaggcaggaacgcccacggagcagtccccgggctctctgttacctccaccacccaccctggcctagggcctgaggactgctgggcttcctcctgcctgggggtttccggtggtcaagtccactgtgcccagccgtccagaaaacaggagccacctgcccgtgtaacacggtggggcttttaatccacaggagcctcaacacctgtgctcctgggacttcctcttttagggggaacatgtggaaccttggtcccttcaggaggggcagtccccacccgccagtcgcccagggcatcaccctctgagcccctctcagtccccagtgtctgagggtgccaagggcctgcggttcctgtctcaggcagttcagcactgctgactcctctggaaagagctcccctgaccgtgggcttccataaccagccgaggtctgcatcgtcagtgcgggcacctggtccaaacccgttattctaaatttgacaagagaacaggggccactggcctgcttttcactggtgagctgtgtttcctggacccattattgatgctggggtctaatgacattttctaaactcttacagcttgtattaaaatatcgaaacctgagtcccttgatattgaggaaagtggtcagttagtcaagccatagagttggacagtagatgcttgcccgtcatcaccaagattgttcattgattttgaagcaatacttcaggattgacaaatgatagcagcctgaaatactgtgtgcgcctgtgagtataatgaacattcggtgagtgtgtcaatggtaacatctcctccctacaaaagatcatagtttctcaggtgaggtggctcacgcctgtaatcccagcactttgggaggccgaggcaggcagatcacctgaggtcaggagtttcagaccagcaccaacatggtgaaaccccatctctaataaaaatacaaaaattagctgggcatggtggcaggcacccgtaatcccagctactcgggaggctgaggcaggagaatcccttgaacctggaaggtggaggttgcagtgagccaagatcacaccactgcactccaggctgggagacaagagtgagacttggtctcaaaaaaaaaaaaaaaaaagaaagatcctaatttcttatcactttctaaaaggtgggcgatggatttcaagatgagctgttctcaacactccttctccttctggaaatccttcagtcagcccaccttggcctctgagctgcctggctgcggaaggaggctgagagatgtcaccagaggatgcatttcagcaccgtttgcactaagatgtaaagaccaaaacacttttcactaaagtgacttttggaactttagatgacattatatttaaactttgtatcttagaggtatttgttttaagcagaaatatttacaatctagctcatcctgagaaccagcctctccacagcaccgctttccaatgcgaccacctttccagagaggggcccacctgtgggttgtggaaagttctttgcattttcttttttcttttcttttcttttttttttgagacggagtctcgctctgtggcccaggctggagtgcagcggtgtgatctcggctcactgcaacctccgcctcccgggttcaagcgattctcctgcctcagcctcctgagtagctgggattacaggcgagcgccaccacacgtgaataatttttgtatttttagtagagacagggtttcaccatgttggccaggatggtctcagtctcctgacctcatgatccgcctgcctcggcctcccaaagtgctgggattacaggtgtgacccactgcacccagccggttctttgcattttctaggacgcagagcagacctgtgtgctgagacctggcacggatgggagccctcttggcacaagaagattgacagctgtggtagaaggtgctgtttcttgccaggagggcgtaacatagagccatttctgattatcttttaccaactctcactcctaatgagaactatttctcatacctaaaagcaagttttactgcctctatggtgaaaatagtctagtttaataatgttttctcttgggacaatgatgctttgtaaatggaaataacacagattctgtactttgccccatcttgtttttctttctttctttctttctttttaggcagtgagacagactttattcagggggactacagcaatgaggttttgcggcagggaaagaggttgcagcttttgggtttgcttcatgccttggacacacagtaacttggaattcttgcacttacaattttttgaattatgaaagtaatacatgttagtggctaaacaagaaaggaaggcacggccgggcgcggtggctcacgcctgtcatcccagcactttgggaggccgaggcgggcggatcacgaggtcaggagattgagaccacggcgaaaccccgtctctactaaaaatacaaaaaaattaggtgggcgtggtggcgggcgcctgcaatcccagctactctggaggctgaggcaggagaatcgcgtgaacccaggaggcggagcttgcagtgagccgagatggccccactgcacaccagcctgggcgacagagcaagactccgtctcaaaaaaaaaaaaaaaaaaaaaaaaaaaaagaaaagaaaagaaaagaaagaaaagaaaagaaaagaaaagaaaagaaaagaaaagaaaggaaagcacgaaggaaaatagcaaagggtcccggtgttgcacacacacaaagcagcagcagccgctggaggtcttccgtgtttggtaaaggtggctacggactcccgcatggagacgcggcctggagggtgtcactgctctaggctgtctgcagggcctctccgcagacctggacggatttcagtgggagactagagcgtcacttaagatgtttgaatgtaaaagcatcctgaatgatcatcttttagcttgagattttggctacctttcaaacagacatagtttgacctttgcagtcctaggtaatgcaggaatggcaaatgctcctgaaggcggggaggcggcccggcccgcactgagcttctcaccggccagagggcgcagccacccggccttcccgaagcaggacagcggcctttccaagaccgcggagtccccgtgagggatggtgcctccggagcctggcatctcgggcggatgagaagctgagcgcggtcagatggcccgcagggtcccactgcgggccgagccctggctgggggacagtttggggggaagcagcagctgcctcagtttacagtggcagccggaggaggacctgggcagtggcgagtgtggctgtttgcatggcggggagaaagaggtggtccctcctgcctgctgctgatgcccacggcctcctgtccccaggaaaggggtctgcgcccctcccccaccggaacagcgacagaagaggcgaccctctcaaaggcccttctgctgctcaccgcggggtgagtgatggtgtggagcaggatctgggtccaaggtcttcttccacgttcagggttcccgtggtaactgaagaattatccatccagagaggcaggggagggcctgggacagggatatatcttattattgataagtacaattttaaattttaaattatcagcaggaccgtaggagatgacataaagaggaaaaataacctgtgtggcgctctcagcataaagcgcccaggttcagggatgcgtgtgcgtcctgctgtctgctcattcgaagagcaaaggaagcagggatgatttagggcctccgaggtgacacggaatcgggaggaatggcgccacgagaaagacgtctttctcattttgtgagcagagagcccatcgttcaggaagagcatctgagccacaaagctaatcacagatcaccgagccagcgccggctcctgatttgtctgtgtggctccaggtggcaggtgctccacggcactcagtaaaaggtgcatatggtgaggggtgcaggcagtggccaaacaagggcttccctggatcctggagtggctccttccagccacagccaaggctgctggagggaagaccaggccgagggcacgtcttgcgtgctctcactcacaagcacacacctgtatttaccatgttatgtacacccacagaatcatctttaagatcttgttaatattaatatataaattgaaggtcggaggcagtggctcaagtctgtaatcccagcagtctgggaggccaaggctggtggatcacttgaggtcaggagttcaagaccagcctggccaacatggtgaaaccctgtctgtactaaaaacacaaaaattagccgggtgcactggcacatgcctgtaatcccagcttctcaggaggctgaggcaggagaatcgcttgaacctgggagtggaggttgcagtgagccaagattgcaccactgcactctagcctgagtgacagagcgagactccatctcaaaaaaaaattaatatataaattaatatgagtaacatatacacatacattaataaaaatatacaaaataatacatatagtatataataatatatgctaagtataggaaatatgaataatataaataaaaagattatgaattatgcattaaatattaaataatattaatatgaatataaatatttattatatctatctatctgtatgtacctatatagacacagacagatatctatctctatagctagatatttctatctctgtacacactcatctatatccacatgcatgtatatgtaaaaagagagagagagcagagacatagagagatttatttcaaaggattatcccgtgctattgtagaggttggcaactccaaaactcacagggcaggcaggaggctggtcattcccacaggaactgctgttgcagtctacagcctgaagggagaattccttccttcttgtgggaactcagtcttttccttttaagaccttcacctgattgggtgaggcccacctgccttcctctgactggatgaggcccacccacattgtcagagggacatctgtttcactcaaagcctactgatctaaaatgactttgattaaatgaccttcacagcaacattcagactggcgtttggccaaacagcctggcactgtggcccaacctaggtgacgtgaagctcatgacctccctgtgcctgcagggcgctgtggcactccatccctcttctgtgtcaaagagctgtctgaactgctccagcaactctgacacatggggacgtcctgtcctgaagggatgggggcatgctaggactggtttgcgaatctctccataaatggccttgctgtctccagcatgagagaaggttggagcgtaaagagcagatttctgcggtgtcccttgtgcttcctgaaaggagtcccacactcaagctcacccccacggtggatgtgctggaccaggaccctggggtgctcggggcccgagggtgccaggattagaacctccacacccagaggttcctgcctggggcctgcatcacccgtggcgtctcctgcctgccccggattcctcctctttcttccctttgccgttttttctggctcctttagctgcaggtccacagctggcttttctccagctctcctgcatactggctgagaagggcacctatgtcattgttgctggctgtttgcgctgctgtaatgcaatccctgagactgggggatgtatacaggacaacactgatttctcatagtcgtggaggctgggaagtccaagatcgaggcactggtaggttcgtgtctggtgagggccccagtctgcttcatagctggtgcccttggctgtgaccttcagaggaggtgaacgctgtgtcctcaagtgggaggcagcagaagggcacatccagcagtgaggctgttgctataacaaatacctacaactgtggaagcagctttggaactgggtaatgtagaggctggaggatttggaaggtgcatgctagaagcagcctagattctcatgaccacagagaatcaccactaagggtgattctggcaggtcctcggaagagggtgctgcggaaaagcccagttctcctcacacttaaatggttgtgaacagaaagttagtagaaatatggagagtgaagactattctgatggggtcttagaagtgaggatttttttttctttgagacagggtctggctctgtcacccaggctggagtgcagtggcgagatctcagctcactgcagcctcagcctcctgggctcaaatgattctttcacctcagcctcctaaatagctgggactgcaggctgccctaccccgccctgccacctcacatggcagctgttctttattcataatccccactgtctgtctctgcttctcttctccctttctcttctctctctgtcttttggggtttcgtcatgttgcccacactggtctgaaatcctgggctcaagtgatcctcccacctcagcctcccaaagtcctgggattacaggcgtgagccaccccacccagccagaagtgaggaatatcttactggacgctagaggaaagaccgaccttgttgcaaaatggcaaagatcttggctgaattatgtccatgttcaagtgctctgtgtaaggagaagtttaggagccagaagctgggacattgctaatgctgcatggagcctttttcagaggagtcttaatcccattcgcatgagaggaggccttcctcaccgcctactcccctcccaaaggcccggcctgttacatttcattgcaggaatttcggatgggatgcattcacaccaaagcgtcaccctcctgagtacctctctgaagccaccttggagcctgggctcccccaggcatgggacagcacaccccgtccactggagccgaccctgatgaatgcaggctcactggctttgccaccgcatgcccccggaggcatcagacgctgcttgtctctgctgcctttgaaaggtgtgcgtggagtcgcaggcctgaactacatgagatcgagacggaaaccccgccaggcaccaactaacggatgcccaggctggagtgaccctcctcctcaccctggcagcagagacccacgttggccatcgagaaagaaccgacgcctagcgagaagtgacagggaacattcaggatcccccgcctgcccccgtctggaccttgagatgaggaaggactttgtcgtttttgtcactttaaccgaatcttggacaatcaccgcccaaagcgtgcactctgtgggctgtttaaaaaattatatgcgcacagactctaaaggaaaaaccagagacaaaccgctcatattccatgaaccttccttctgcataaaccgccacgtgtcgcttggcaaagccgtgggcctggcagtggggttagcctttcccactcaggaaccgcgctggccacgtttctgccggcatcagcgcccctgagctgctttccaaagcgcggcgtcaggaacgtcactcttcactgttgaattcaacgtgggcacctttaatggctcagtcatttttttaaaaaaaatcaaaattccacgcaggggccttggttccagagctccctttccaggaggctgttgcgcgggctggccaccaggtggcactgttgcatagcaaaaggaacgcggctccgcgctggagaaccgggccgggctgcgcggaagccctggagggccagccgggtggagggagctgcaggagggggcggcgtgctttccgggggtgcaacttggttttccctggagggataaagctctcctttggcaggtgcctgggggtgccctttaaagcagggagcccagggaagacccagctctcttcctgtgagctcatccctggcattcagggtgaaggacctgcagcctggtctcggaaacggccctccaaggcctccttgtcccctgaagcacacaggcagaccgcgggtcggggtgcaccgtggctgtcccttccctccaatgctgggcgacccgggcgggtggccaccgcctgacctgggcctcctggctgccagcctgcacgccctgggtgcagaggcaggcgagcctggcctggtctgaacagtcttatgaggattctctgggcccgtgtgctcccgcctgcccctgaagggcgtagtggaagcatccgaacatgcactgggtaccctcgtggcctgggacagcccttccctgctgggctccttgctttgtgttaaccctgaggcctgggagcctgagttggggaaacgggggactccagacaacacccagcttggatgccggcgtccacttctgctcagagaatccagtcaactcagggctttgggctttcccatgaccaaagaaaagaagtcagtgaatgagaatcaaataaaggaaatgattttctgccaccaccggggcgcagacttgctgtccataccactgtccctggctgtagcacccatgtgtgcctgtgtgtccagaggcccacggagcccagatgggcctggggatgatttcagcctccaaggaggccgcccatctcttccggtggcccctgcttctcacccagtgtgggccaggcccacctgaatgctgagggcaaggacgagtggtcgttacctaaacgagccagagatggcctctggggactggcccttgggtcacttatttcttccctgcaggctgagctcattagttcaagagcccactggcaccaaactcagatttttatacattcaattgttttaaaaatagccccaaacaagcagactttcagccatttagagcctgcctgttgcatgtattctgcaaaacctcacctggcagctgttcgctattcatcatcctcactctctgtctatctctctgagtccatctctgtctctgtctccatctccatctctgtctctgcctctgtttccgtctctgtctccatctctgtctctgcttctcttccccctctctcttgctctctctcccttctctctccgtctttctctgtctcttgctctctctcttccttctttcccccgctctctccctttctctcccctttctctcccccacccctaccaccctgtctctcttatctgtatgatggggaatgaaggatgcagcaatggccgcccatgtgtcggtgggagctcacttccccaagcctttacttgaggggactctgaagggcttcatgtcgcgtcagcttgtgatacgcacaagccgactgcagcagacacagctgggccctgtgtgcacatcttcgcccacctcgaggtcacctgtggacaccagcatggagtccagcctgtggggaaggctggagtcagggaggctaatgcccttctaggggcaatctgtactaatgaaagagaaataactcagaggacaccatggcgtcccctgcagccttgcagagggtccccagcagctgttcctgcactgaggcctccttggcctcctcctccctcttccctgcgcttccccgaatccgcccccaacccgtgagctttgccctccagcctttggctcagtgtctgtttttgaggaaacataaactaagataacagccttgtgatttcagggctccctgtgaccgcagcagggcctgggttatccgggcggatgcagctgtccacagacaggcctgaggctgggcagggggtagggggctgtggcctgcgtgtgcctctgttcccattcccgtccccttcttccttgaggagcacacgccttctccactgtcacattcctcctgcatcaggagccccctggaacccgcggcttcgggtctggtgcaccctgtggggcctcatgccacttggtgtcacgtactcaagagtttattttcccacagaaatttaggagaaagtagggattgtttgtagtcaaaggaagaagtgttcctcagtggatggagaaggcctggctgtgctccaaggccctgggccctgcatactcatctcctggggcttcctgaagctccctgtggagcgtgagcctgccgggccacctggagcacagggggcctccagggacagtgggggcactgcgggccgggcccacgagtgggctccttcacctgggcctcccccagggctgacagccccttggatcccagggaaatgcgtcccaaccacagaatgaggtgctgctggggtacctccttcctcgagcaggacagccagtcatggtgcccctctctgagtggcatgggcatccaggtagaagagtgccaggacatgcctgggcagcaccctctgggatgccacgggctctatccccagctgcccgctgtgcctcattctggggttgatgggtgccagggctcccgcatgctggaccagcagggcaccctgcaaggtggtgccgccttgaggcagtgccaggaggtgacggctcgcccacacaggctcccgaacatcagggatacgcagtaaagacaacctcattctaatgttctgtctgtttggatagggacaaacacagcccagatctcagccccccggcagacaccagacaccgcaatgatttgctccagcaagccaactgtcccggagcggtagctgctggagtcctgatccaactccactattgtcattcctatacccaggtgtgggcgatctgtgctgttagacctggggggctgcaatgggtgggacggaagcctctggacccccagtccctggtgtagaatggttcctgggagtctggaagaggtgccatttctcacgcgcctgtcggggatggactgacagctgcaggacccacctcgccgcttctagctgtgggtccatgcagccaacacagaggtttgtggtcactgaggacattcgtgcagacactttgtccagtgcccgaggggacagctgcaggccagctgtagagtccatgcaagttctgccctgagcggtttgcattgaaatccaggcagtcgtctgctctccacacacttccactctgactgggagggggccgcagtgtccttcaaccccatgggtcagcgtccacaggccctggatgatttaggcagagttataccagtaaaagaccacagctgtctggggaagccaggagcatgcctggcacccactcagatgctgccctggcagcagccttgttcagggtcccagtctcctgcacatccgggacgctgagcagggctggctgtcaagtggggctggctgccgtgctcacctgccttctgctgctgggggccgggggactgtgcttcttcgcctttagtggtggaaggaaaatactcatgtaacaaaaactatacacatgaagtgttttcccccaaagaaacaagggtgctagccggaaagatgatcagctgccagaaaaccaaataaaatagcaaaccttctctataggtgcccaagatgcccttgacaaaactccaaagccactcatggcaaaacccaaagccaaagagagatgggaggaaactgctcaaacatgaggaatcgtgcttctcaggagccagtggtgaacacgaccttaacatatgaaatgcaaaccactgtcattcgaatgagaactaacgtggtccccgtcacccccatcatttattttggttctagccaccgcaggaggatcacagaataacacaggccatgtagggaaattgcagcctggccgggcatggtggctcacatatggaatcccagcactttgggaggttgaggtgggcagatcacctgaagtcaggagttagagaccagcctggccaacatggtgaaaccccatctctatcagaaacacaaaattatctggccatggtggcaattgtctgtagtcccaactgcttgggaggctgaggcaggagaatcacttgaacccgggaggaggaggttgcagtgagccgagatggtgccactgcactccagcctgggtgacagagcgagactccatctcaaaaaaaaaaaaaaaaagaaaagaaggaaagaaagaaagaaagaaaaaagaaaggaaagaaaggaagaaaattgcagcctgcctgagtggggtgtcctgctggtgaggtgagtgctgctggggtctgggcttgttgctgacatatgccttgagaaaggtttgaatagggccgggaacagtggctcacacctgtaatcccagcgcttgagaggctgaggcaggcaaatcacttgagatcaggagttcaagaccagcctggccaatatagtgaaactccgtttctactaaagaccccccccaaaaaaaacaaaaaaaaaacaaaaacaaaattagccgggtgtgatggctcatgcctgtactcccagcttcttgggaggctgaggcaggagaatcgcttgaacccaggagatggaggttgcagtgagccgagattgcaccactgtaatccagcctgggcgacagagcgagactccatctcaaaacaaaacagaaaggtttgaatgttcctcagccacttgagtggcccggtctgcccaagtatgagagatttccagggatgcagggctttcaatgctaagaatcattttaaaaaggcagtctccgggagtgagtgggtcgccctagcggctgtgactggtggcgcccttccccgcccctcaccagccctgaagaaactgcccctcatttttgtttttctttgcatttgtgtgatggctgctaactttcttgcatgcacattggccatgagtgtttcctgtaagatataagtttcctgtgtgtattatttgcccatatttcttttcttttttttgagacggagtctcactgtgttgcccaggctagagtgcggtggtgccatctcggctcactgcagcctccacctcccgggttcaagcaattctcctgtcccagcctccgaagtagctgggattacaggcgcccgccaccatgcctggctaatttttgcatttttagtggagacaagagttcatcatgttggccaggctggtctcgaactcccgacctcgtgatccacccacctcggcctcccaaagtgctgggattccaggcatcagtcacggcacccagcccatatttctacaaagattttgtcttcatcttttaagttcagaatgtaaataccctgtggctcttccatcttgttttgggccttagtctgaattgcgccctgtcaccacaaggtgcatgaacaagggcactggcactgccttcagtgtcacagaaacaacaaaacgatgccaaacacacgacgtgaaatgctgagatctccatcaacaggtgaccgccgaattcacgacgatccaacgtaaccgtggaagctgatggaaaaaaggaggtgcatatacatattgatgttacaaccgtcccatgttaggctgggcgcggtggctcaagcctgtaatcccagcactttgggaggccgaggtgggcggatcacgaggtcaggagatcgagaccatcctggctaatacggtgaaaccccgtctctactaaaaatccaaaaaattagccaggtgtggtggcgggcacctgtagtcccagctactcgggaggctgaggcaggagaatggcgtgaacccgggaggcggaggttgcagtgagctgagatcgtgccactgcactccagcctgggtgacagagcaagactccgcctcaaaaaaaaaagaaaaaaaaataagaaagaaatctgcaggtttatgagcatgagcacagacagtgggtgaaacagacactaagaggtgttcacactgacagcggaaggatcaggacgagaaggggttgggggaagtttttcgcttttaatttttgtaccccctattgtttacccagtaagaatggtcgggtattccttttataattaaaggaagtaatccattgaagaaaataaaataaataaagttgaaaaagatgcatgcctattgtgggcctttcttttaggtaaaaataatgtctagaaaaatgaaaaccaaaatttctaaccatactttttttaaagaaagaagttggtaaagataaaaacataaattaggccagactcggtggctcacacctgtaatcccagcactttgggaggccgaggtgtgtggatcacaaggttgggagattgagaccatcctggagaacacagtgaaacgctgtctctactaaaaatacaaaaaattagccgggcgtggtggcgggcgcctgtattcccagcaactcaggaggctgaagcaggaggatggtgtgaacccgggaggtggagcttgcagtgagccgagatcgcgccactgcactccagcctgggcgacagagcgagactccgtctcaaaaacaacaacaaccacaaaaacccaaaaaacataaattaaagaaatagaaaagaagagctgagcatttcacaaacggagagcaggtgtctggtgtttggtgtgttccggtcgagtgtagtcaggaaaaggaagccgcgttgtctgcggggcgggggcctgtgcttgtggctgcagcagccccttcccatcagataaggacattgttcatgcgcggactggcacccaggacaaaaacaacacccacaaaacctggtagccccacttaatgttcccctgccgcggcggctggaggatggaattaccagaagcaattagacaaaggaggttcagaaccacaggcatggaattaactaactttatttaagatgacatgtggagagactggaaggacaccttcgctctgtctgggaagccgtgaggctgagggggctgtcccccgcccgggtcccgtggggagcccatcttctaccaacccatcccaggttcagcagggtctcttgcttttgttcggagcgcagcaggaggccactgaggtgcccacaaaggggagagatgggaggcagaccatgttctcagtgaccactgtctctgctgtgtgatgaggggttgtcttggggaggaaagaatgcatgtgaccggcaaagctgcagaaactcagcttagaacaggtcacaatcatggtagcaaacactggggtggggaagtcggccctgactgagaggccaggatggatcccaggtacgtctctgaggggaaaggaacagggcccgtcacgagcaggaggtgccgctgaggaaaagcaagtttctgatgtgactcctgacttctcacaatggggcgtggcaccagcaatcagaagggtaaaggctgtgggtcgaatcagaaggtgcatcatacgtatgccgagatcagacgcctgtgacacggccaggaggtgtgcagaacacagcccatgatgagactgccccttgggcacagttagggactgcaggatcatatttaaaatttctggtgcacagatgttgtgtaaagagactgggagagcgggagattgggagaggggaaggagaggaggagggggagaaggagaagagagaaggcctccaggagcctcagagctgatggacgcggagaagctgcgaagcctacacaggggacagccgggagggtaggggcagcaggtgagaggagagagggcgttaagctggacggggtgagctgtgcgggtcaccacaggcgcagagggatgatgagcacagaacactgccttcgggggcttgggtgaccacgaagacgtgtgtcaggctggagaccctaccctgcttagaagctgaatgtcagtctatgactgtctcatgggtaccaataaacatactccccatggccctgtcccactctccacggccctgtcccactccccacggccctgtcatactccccacggccctgtcaaactccccacggccctgtcatactccccacggccctgtcaaactctccactgccctgttgcactccccacagccctgtcgcactccccacggccctgtcccactccccacggccctgtcacactccccacggccctgtcccactccccacggccctgtcccactccccacggccctgtcacactccccacggccctgtcccactccccacggccctgtcacactccccacggccctgtcccactccccacggccctgtcccactccccacggccctgtcccactccccacggccctgtcccactccccacggccctgtcatactccccacggccctgtcccactctccacggccctgtcccactccccacggccctgtcacactccccacggccctgtcacactccccacggccctgtcccactccccacggccctgtcaaactccccaaggccctgtcacactccccacggccctgtcacactccccacggccctgtcccactccctacagccctgtcgcactccccacatcccgtggcatctggctgtacatggaagtgaggaagctgctgtctcccccaaagaacattgctcccagccagggctcagccctgtggggcaggactcagaggctcctggttcagagaccagggcccttgtcacttgcagcgtgaacagcagggaactttgcccccgagtcccacaacagaggtggggaccttgtcacggtgggcccaggtgtgacaacacagggccagcgattcttcacccggcagcaaacactgcagcagacgacaaacattgcagcccttggcaaacaaaaagcacgcagcaaacagcgtggtcagcgaaaagaccctcccctccccggggatcagacagtgcaaggccatccccgggatgacctgcacccacccggctgcctgtgtgaccagccacagaacccactctgcattagcacccacggccaggacaggcagggtgctgcgcccgtggcttcctgcatctgccgacaccacccgaggctgccaggccacaacatgaagtcagctgtgccaggaaatcccaagcctcgcccacacctggccccgggctgttgctgcatgccaaggggttgcccacctggctgtggctgccttaccccatggaatccaggctccaactgacctcaccattctgtgggttaattttcattcttaaaaccttcatctaaagacctttgcttcctggaacacaggcctgggttttcccaacagtcgtgggcacccggcctggcacgtgctgctcagtggagggacctcacagcccgttctatgtgagctgtgcaggaaaagctccacggacaaactcactctccgtgacaatcaggaggtttcttctccaaccacaagaaggagctgggggagctcgtgaggccaggaagagaacagtcctaatcccatccttcccctcctcagcagtgaccccagggtctgctgtcctgccccaacccacacttcaaagaaggaaggacacctgccttcccctgctacctcacaccccgaagcatggggagcatggggacccttggcagagtccttttgtagtgaagaataacagactagtgtaaaatagcagaaaagaagctaatggccaaacacatccaagctggggaaaacacctgttaaatataatgacagaatatgctctcatcaaaacccaggaaactttaagaatacactaaacctcacaaaatgggggcgaaatacaatgatgaccacacgtatgagaaatggtcaatggtagaattgaaagaaatgcaagggaaatgaaagataaggggtcctttccaagcaaagtggcaacgccacaacagctcgcagtcagtcttggcgggacaagaatgctgggcagtgctggtttgcagggaggggtcaacttttctggaagcagcccagcaaagtgccccacgagccatcaattattcctgtgcttcgcagccacagcccacgaatgcaggtgcagccacagaagcgctggcagaggggaggctgagagtggcgctggttgaagatttctcacaggaaacaaaaggcacagcctccacgtggctcatggccatgaaaacccttgactcaaaactttccacgtcgtgaggaagacgcgggtcagctgccctagttgggtgatgatgatgctgtcagggaaagcgtctgtgcctatgtggggagagtaggggagtgagaaacaaagcaaagcgtggtggctctgtggctccagtgccccggaggccacggctcactttttcacaatgaacatgggctattttcattttttaaagtctactaatgtttctaaggagaccatacagaaccgaaaattctgaataaccttgtcttccataaggcagacttttcatttctgtcacctttccggaagggctggacacagagtctgtgggtctgtgatggaggcgccaccatctcaccccgagtccacggccctcagtctctgtgctccccgagccgaaggtgaggaatccatgccttatggttggcgagggctgctggggcacctgccatctcatctgcatcctgggaagcaggaaggagcacagaggaaaacacaagcctgctctggccagctcagtgtgctccttccagaaacaggtaaacacaaaattaccctgcgaagccgccattccattcctaggtctatccccaaaagaaatcaaagcagggactcaaatacttgcacagcccttgccacgacctggatgtagtcagtgcatctgttcccagcaaaactcttgttgaaacgggacccccagtgtggcagcgtagggaggtggggcctgaggggagggagacgtgtgggtcgtgggagtgactccctggggagtccgtggtgctgggagtgattctcctcttgtgatacagggtgagttcccatgggaatggatttgttcccatgagtggggcttgttctgaagccaagacatccctgagctttatctctcttcccgtgtctgcttcccctttgacctcctccagcagaagccagggccatgccattgaacttctcagccagcagaactgtgagcttgatgaattaccccatcacagaggttcttttatggctacacagaatggactcagacacccatgctcacagccgtgcagtcacaatagcccaaaggtggaaacaacccagcaggtgaggggatctgaaatggggtagacaaacacatcggggtcttacggagcctggaaaaggagtgtgctctgacgcctgcagcaacgccaccaaccttcacagcctcgtgccgagtgaagccagccagtcacaataggaccaatgctgtgaccccacagatggaaggcccccagaggagtcagattcaagaggaagatggcagaatggcagtcagcagggccagtgacagaggccgatgggagtgagtgattagtcaggacggagctccagtttcgcgcgatgaaaaggtgctggagctgcatggtggcgacagtggcacagccacgtgcaggttcccaatgccacggaactgtgcacttaccatggggatggtgggaactctcatgtacccgcatttgaccagagaggaaggaaggaagggaggggggagggaggagggagggaggtagcagagaaggaaggaaggaagggaagggggagggaggagggaggaggcagggagggaagaaggaaggaagtgagggagggaggaagggagagagggatggagggagggaagaaggaaggaaggacggaccagcctgttaggctgactgacagagtaccccctgtcctccaatgctgcccacggcaggcatgtggcagtggctgacagggagtgagtctggaagcgacccttgtcggggcagcctccttggtcctgtgattcaagacagggtgaaagtcagtggcggccattggtgcctctggccggggttcctcacaggggcccgcaaggggacagcgaatggagcgtggagggtggagggctccttctccagaccggagcgatgggttcgggagccattctgtgcctgtctttgctgctgggctgaggagctggatggcatgctgggagtagtgggagctgctgaggagtttggtcctggagcgaagaggctgaatccgcatgtctggagtcaccgtggagggcacagctagagggagcagcagggtgtcccagggagaagacaccagggctggaattagagggacatcaaggctgatacttagaggcatccaatatatggggcctgcctgatgggctgctctcaggtgggatttggggggtgtgagaggggtcagtgcccaaatgaccatggggtccgtggcctgtatgcccagtcaggtgacgacgccattcagaaagtagatctcatggggtgcccggctgctgagtctcaggccagatctgcagtgagtgtgctgccccaggcgtggaacactctggtgccatcgggacccaaggctgagtgcacccaagagctgtgggtctgaaacagcggtcagaggtcactgacatgtggaggaggcccctggagtgtgggagacagaatccccaggtgtcaggcttggcaggaggctttgcaggtggggaggaagggcaggtagcgtggctgccggaggagggagggcactggtaggaggagggtggcctgtcccgggcagaccagcctctttgggctgtgtggccccagctccctgagcccagagggaggtgagggtgagaaggcctggaccaggcaggacgcagcccccagggcccctgctgggaagaggtcagaacctcccaaggacccagaaggccaggtaactgagaacggggctgctctctgaatctccagggaggacaaaggcggccatggcagcaaggggacagggcagagggaaaggccggcaggtggatgttggaagccgcagattcccatccagtatcctagaggaggagacccagggctgtgtcctaggaggcccaggaagcctggtcagcctggaggctgagggcgggcccgggagatctggtaaggacatcagtgtctccacgaagagcagcagggtctcagcccatggcagccgcaggccccatgactggggccgcagcctccagagccgccacagcagcccgttgttctggggggtcaaaggtggaggctgtcagaggggcagtgcagggggctgctggggtgaagccccctgtagcagcagcacccagcctgctgtggctctgccctcctggaccccctgccctcctggaccccctgtcctcctggaccctctgccctcctagaccccctgccctccaggaccccctgccctcctggaccccctgtctgtggcccctgctcctctcctccttccccgacacatgactggaccccccgatctgcagccggggtctgggcactgggggtcctgtggacctctcggtgtctggggacaatcacaggttcccgtgcccacacccagcctctgcttccagaacacactagagggtcccggcatcctgatgagtccactgtccccgcgatggttttcagggatggagaaggctccctgtcctccgctggaaccctgcagccgggctgacggtacccccaccacccacccaggggccccagaccctccccatctccaccgccaacccaggccccggctgcgcacgcggggccaggccgtgagctgctgtccccggatggggccgccccgggctggcctggctcactccgtgtcacagatattcccacagagaccccagcgagacctgcagaacattacagcagaatgaaggagagccagaggaagaggcagatgtgctggcctgtaaacagtctgatttccaatgtaaaccagattcaggcccacgacatcaggtaaacatctgcatcagagcccccggccccccaccgcccgggaggccccggggtccacacggccgactctgggacccgtcacagtgaccgccgagacatttcgtaattaggcaaaattgatccttgcattccttccctaaatcccaaatctctgcaattttacttcttctcaaaaatgaaaacatttggcaattagctgatccaagtgaaaaaggtagagaatgtgctctcaactggaaaatgccaattaaggaagcagctctgacttcccacccgccctggctaagctgggagcttatcttccccgagaagaatctgctgggataagggggcttgggaaacaccgagggcagggctgcctcctcagcttcctctgagagcagattagccgtggccttgtgccagcagggcctgggtgccacacagggtggcaggggtggcagagccgggcccggctctggtactgggatttggggtggcgggacccagtggggcacccgcttgtgggcggcactgagggcggtgacgtaggcagcgggtgccggtgtctgcccctccatctggccgggctccccaccctgctcctgcagccctggacctcagggcccatttgcggtgcaaggcggctcttggccattttgcccgcagggccctaccttgggtcttgggagcttctgtcccttgccctctcttgtccaggtcagcatctcccactgtgggaatcctatgtggccccatcgtctggacagtgtgggtcaggtcactgtggctgttttgtgatgcgtgtgtgggctcatccctcagtgctcagaagctgcagacactatggaaccgcttttcaggccccgtggccgtcacccccgctctagagacttgattgcagggaccatgcccggccggcctaactgcacccctcactccaggtgggtggggggacccaggcctgctggcccctgtggtggtgcagcccagaaggtgtgaatcagtttacactgttcagtgcctgaataaaagtcacaggacaaagaggacttggttgcacaaactactgacatgaaattcacattttgtcctgaaggaaacgcaagatgaattgaactcatgttcagtttttatttctcatttctcccgcctcagtctcttctcacgtgcacgacctcacagcgctgtcacaaggcctgctgggcacacgcagctcatagagaagtgatggcttcctccttgccccctcacctccctccttcccctctccccctcacttcggagcacgcaggctgattgtggagacatctcccagccaggatgtgtcaacagggaatgtgctggggacagcgggagttcacagccacccccgcaggcgccttcctggagcacgtccacaggccatgtgcagctgcatcccccacgacggcagggacaagttccttccatagggcccgggtggcccccagagctgcaccatttatgatccggtcctttgcagaacgcaagggacagacacatgaaccctgacctaggttcttgtgcagaaatgttctctcatcggaatagaaaggtatgagtctcaggactggttctctgcaaagcagccatcggcctttcaagcagaaaccatggagcccccagaggctgagtcttccaaggcgctgggagacttggcgtttgcctcttttttaaatgcaatgaccgttgcagtgcatggaatcagagacatgtatctatgcgtagaaatgagtctgtaaacacgatcaaggtgtgatttctgtatgacaatgcagttggatcagaaattggagagtgctggccgggcgcggcggctcacgcctgtaatcccagcactttgggaggccgaggcggatggatcacttgaggtcaggagttcgagaccagcctgggcaacatggtgaaaccccatctctactgaaaacacagaaattagccgggtgtggtggcgtgtgcctgtagtcccagctactcgggaggctgacgtgggaggatcacttgagcccaggaggcagaggctgcagtgagtagagatagcaccactgaactccagcctgggcaacagactgagactccatctcaaaaaaataaataaataaataaataaataagaaagaaaagaagaaatagtggagtgctgtggtcactctggaaaaagaggagggaccccacccaaatgtggttcctccgtcaaccctgaagacgcccccacacaccgggacgagatgaaagggtctggtacttacctagctgggctttcacggggtgcacggtggcttcaggaagggagctggcgtggggctcttcttatgcctcgggggtggggtgatggcctcacatgggcaggagcctgcagggcttgagcctctcactggcaccaaagacacctgccctgctgtggggcacacgggaagagggatgggtgaggtgtcaaagcagtgagccgtcaaacatcataaaaacggagtcaggctctttattgcaggaaacaatttgcggctttctgtgcagagagcaggggggatttgaggtgggctttgtagagtgagggagttcaccagattgacagtgtgggctgggtcaccctgtgcaaagcagcgatttccatgttgcccctgagagaatgttttcctgtgatctccagcatcgagatttaaaaattatcatgttcatagtctgatgataaaacattaatttttaggaaggcagaggacctgcctgcttttcctgataagacctcgttccattgccctaggtcaggcatggattattaactctcagggttttgggggaccagcagccacagatgtggagtcctggggaaagggtgacagcctcctctgcctccggggatttgtccttcagtgacttgacgcccgcaagagtggatgctaattctcaccgtccccatgaaatccctgctgacgcatgctgcccaggagacatctccacaatcagcctgcctgctggagagaggaaggagggaagcgagggtgcaaggaggaagccagcccttctctgtgagctgcatgtgcccagcatgcctcatgacagccctgtgaggtgagaggagactaaggcgggagaaatgagaagcttgcccgagtcacgcaaccgaagcacagagccagggtctggcgccctgagaggtcctgggtgcattggatgctgtgcacgtacttcagcaaagaggcaggatgttgtcatcttccttcggagccagtaacattttctgctgccagcaaggaaagaacattggatcacgcgcctccatgcaggcagggtccttcagtggcgctgatcctgagcccagccctctcgtggtctgtgctgacgccagggcctctcgttggaaggcctcgtgctccacagttcccccacaaaggggaggatgctgaactctttacctgtaattctggcctcgaagcagctgttttctgcctggcttctcaccccagccatgcacagtggaggtgtcagcaaatccctggagagaaagcccggtggacacagggttcctttctctgaggctccctttccctgggatcacagtagctgagtcggggtctccagagaaacagaactgggggtaggggggtgcataaagtgagaaggagatttattataaggcggggactcatggggtaatggaggctgcaagtccagcatctgcagtgtgggcagtgtgggtagtgtgggcagtgtgggtagtgtgggcagtgtgggtagtgtgggcagtgtgggtagtgtgggtaatgtggatagtgtgggtagtgtgggcagtgtgggtagtgtgggcagtgtgggtagtgtggatagtgtggatagtgtgggtagtgtgggtagtgtgggtagtgtggatagtgtgggtagtgtgggtagtgtggatagtgtgggtagtgtgggcagtgtgggtagtgtggatagtgtgggcagtgtgggtagtgtgggtggtgtgggcagtgtggatggtgtgggtagtgtgggtaacatgggcagtgtgggtagtgtgggtagtgtggatagtgtgggtagtgtgggtagtgtggatagtgtgggtggtgtgggtactgtgggtagcgtggatagtgtgggcagtgtgggtaacgtgggcagtgcgggcagtgtgggtagtgtggatagtgtgggtagtgtggatagtgtgggcagtgtgggtaatgtgggcagtgtgggtagtgtgggtagtgtggatagagtgggtggtgtgggtagtgtggatagtgtaggtagtgtgggtagtgtgggcagtgtgggcagtgcaggcagtgtgggttggccagctgcagacccagcagagtccgtggagcggatgaagtcccaaggccgtccgctggagaatctctcttgctcaggaaggctggctttctgctgtattcaagactttaactgatcggaagaggccacccacattacagaaggcaacatgcttcacccaaagttcatccatttaaaagttaacctcaggctgggcgcagtggctcatgcctgtaatcccaacactttgggaggccgaggcaggcgggtcacctgaggtcaggagtttgagaccagcctggccaacatggggaaatcccgtctctactaaaaatacaaaaaattagccgggcatggtggcacacacctgtgataccagctactcgggaggctgaggcaggagaatcggttgaacccagaaggtagaggtggaggctgcagtgagccgagatcacaccactgcactccagcctggggaacagagccagactccgtctcaaaaaaaataaataaatgaagttaatgtcctctaaatacactttccaaattgacacataaaattaatcatcataagagagctgacattcattttttaatattcaaaataggatcttgcaacaagacagtcagctggaaagctaggcttgtcgagagaggcagacagagagaaagagagaaacagagagaaagacagagaggacttgctaagttccttcatcctatccagaagcaaacccgggagacttcgcccatagctgctgtgagcgttcgtgggcaaatgctttcatttctcttgctaaatacctaggtgtagaattggtcatatggaaagcgtggacctcaccgtttaagaacccaccaaactgtttttcaaagcggttgcgtcgtttaaaatcccctcctcatactgtatattttgttctgctgacccgtttgtctctcttgacaccaatccccttctgtctccatgactgtagcctcacggcgagtcttgaaatcacagatctttggtcctccaactgttttctctttttcaagattcttttggttattctaggtcctctgcatgtccttatattttttataatcaacatgggaatttctcttaagagaaaagaagcgcttctgggattctgattgcaatggtactgaattcattaacccatttgggaagacgtggcatcccgtcaatatcaagagtttgacccgtgaacgtggtgcgcacctccatttatttcattcaccttgactttctcccagccgtgctcttagcatatctcgtacatcttttgtgagatttattcgtaaggattcatgttctctctgtaattttaaatggcatttgagttcaatttctgctgtaatacagaaatgcaattgatttttagtggcctcatgaagataaaactcatatcacacacttcacccacttcaagtacacaattcggtggtttttcatatattcgcagagttgtccagccgtcaccatgctctaaccaccatcacaatgtaattctagaacatttttatcacctcaaagaagccatacccatcagcagtcactccctactcctcccgctgagcttctccgctggccttggccaccactgatctctcctccctctctgcggctttgcctctgctgaatacaaatcgggttctgctatgttcatccttctgtgtctggcctctttcacttagcgcaaggtttcaaggttcatgcacgtcatggtgaccagaacttcatttctttttatagctgagaaataccccattgtgtggctagtctgcgttttgtgaaaccatttattggtgctgggacacatgggctgctccctccatgtggctattagaacaatgccatggtggacatttgtgcacatgtttttgtgtggacacgttttcatttttcttgggtggagtagaattgctaaatcataggatacatctatgtttaacattttgaggaactgccaaactgttctccaaggcgattaaatcatgttgtgttcccgccaacaacataggagtgttcgaacttatccacgtcctcactaacacggattatcggcctcactgacgctgttccagagacagtgtggaatgatgcctcactgtgagtgtgttttgtgcttccctaatgagtagtgacatgccacaccttttcctgtgctatttgccatttgtatctcttctttggagacatgtctatcattttttaaatggggttaattatccctttattactgactactgattttgtatactgatcttatagcctactattttgcttaagtcactcattagttctagtagctttctagaagattctgttagattttctacagggatggccatgaccctgtcttacttcttcctctgcaatctatgttttgttttgttttgttttcctttccgtgcctcattgcaccaactagaatagagacgctttgagtaggcactgctgctggttccttctcttgggggaaagcgggcaatcttctgctaggaagcaagatgcctgctgcatctgcttcggagacgcccctttatcagactgggaacattcccttgtgctctcatttggcttgagtttttattataaatgcataacggatatcagatttttttctgtgtctatggagatgatcatatggcttttcttttttagcttgtgaatgtggtgaaatgcactgatctttcaaatattcagttgatcttgcgttactgggataaactccacgttgtcatcatgtattattattgtacatattactgtatccagtttgctaaatgtttgcctctatgttcatgaggggtattggcctgtagttctcttgtgatatctttgtttggttttggtatcaggataagcctcgtagaatgtgttaggaaatgttctctggtcttcggtttcctggaaaaagttgtacagagtcaggattctctatttgttgactgctgggtgaaatttaccagtgaaacaatttgacctgtcatttcctttgtcggaaggtttttgaactacaagtttaattttcttaacaaatacagggctctttggtttatctatttttttagtgactttaataattcgtgtctttcaaaaaaatgtatccatcacatctgagttgtcagatttattgacctgaatgttctgaatagtccctttcatccttttacatatttatagaatctccttctttcccaatcttgctaatttgtgcagtctctctctttagtgattagacaggggaaagattaatcaattttatggattttctgaaatcatgtgtgcagagcagccacgggatagcacggcctctgcacgctgtggggtgttcatcagctggacaggcagctgccacctggacagagtgaaacccaccgcctgagttctggagtaattgtcccaaggaggacctttccactctgggttgtcctggaaagaggctgctcctcgtctaggaagtgaggtcctgggcaaagacctcagtgggagggaggagacatgatcttcctgagtctcagccccaaggcaccagcctggatccctcggtgtgctgcccagagctcgtcaggcactgatgaggattgagaggagggcaggggggagcacccacgtacgacaggacacacacacacacacacacattcccctcctgagacatttgcatccagggaacatgcaggcaattccttgtttgtgcaactaaaactccagagtcccccaaagtgaaaacagcaggcggctccgaagtgaactgcaactaccacctcttccgagacagaaaacgctcagtactgggaggacagggtttccagatttttcttccccaagtaggttccaaaaataccaaggcactgagtttcagccagggcacgcctcgcacctggcctggtcccggggatcaggatgcactctccgcacggagccctcttcttggtggcctctgcggcctctgcaacggagcttgtcctgggacaacaaaggtcttaatctggcagctcctcaaatgaccagccctgggaagggaacatggtcatgaaaataataagaaagaaaaaggactacagcaaaacagaaaacctgatttaagacagcaggacttttgaatcctgatacaacaggttatcagaagaacgaataaattaaacttaccaattaaaagacacaagagtatggatggagttaaacgatgttacccgcgagagacacagaatagttgacaataacaggaagggaaaatgcaagccaattgtatgtggactgaaagaaggctacaaaaggattaaaacattaagccacaatgcagctttctgacagtcaaatgatcaacatacagaaatatattttccaaccacagggcaaaaaaaaaattagaaattaagtcacaaaagggatagtgcaaatattgtatgtttggaaaccaaatagtctattaccataaatttggggttaaagagataatcataattattaaaaagtaataaaaacattgcacattagaaggacggggcagagtgaagcagctgttactgagaggtgtacggtactaaatacatttctcacaaattatgaaattggatgtctacgcagatgttttgcctgtttctaacggagctgtttttgtcattaattttttagttccttttccattctgggttcaatctttcatcagtgatatggtttgcaaatacatcctccagatctgcgacttatcttccgatttcttgttagtgtcttttgaagcacacatttgaaaaaaattcgatgaagttcaccctatcaatgttttattttacgatcttatttttgatgtcatggctaaggaattgcacctggcccacagcttccttgactttctcccatgttttctacaagttttagttcccggttttcatgtaaccctctttgtgttaattcttgtggaggacatgagatagggttccaaacttctttctcatgtggctatccagatgtcccagcactatttgtggaaaagactgtctgtcccccgactgagttctgtttgttgcctttgtcaaaaatcaattgacaatctacataaaacgttttttttttttcctggacttttgatcctgtttcattgatctgtgtggctacagtgaaaccaatacgagactgtctttgttactaaattttgttcttttaaaaaattgttttatccataccgggtcctttaagttatttttgtcatgaagtttttagctcttttttctattctggatacaatcttttatcagttatatgatttgtcaatattttatcctaatcggtggctttcctttcattttcatttgtaaatattaggatcaatttgtcaaattttgcacaaatgcctgctggattttgacagggattatattggatttacaaattgccatgttaacgtgattgtgcctctggcccatgaacacgggcggcctccccagttgctcatgttttctttaattcctctcagcaggatttgggggttttagcatttaactcttatacttctttggttacgtatatgcttctgtattttattctattattatttaaaattttcttaatttcattttcagattgtctattactaatgtatagaaattcagtggatttttgtgtattgatactacactctgcacctttgctggattttttattagttctaacaggagtgtttgtgtttattctgcttagggctctccaaaattctcaaatatgtgattttttttgtctttgactagctttgggagactctcagccaccatctctccaagtagcttttcttccacgatttcttctttcctcttaggatcataagtggacattcactagagtgtgttgaagtgttttaaaggtcttggatgcttgatttagttctctctctttgtcttttttctctttgtgttcattttggatgacttctactcacctgtctcccagtttatggattctttccttagttctttccagtgtgttaattagcctatgataagaatgttgatattgttggtgggggggcggtggtggagaggctatttccatttgacttttgttttttttgagacagggccacgctctgttgcccaggcaggagtgcagtggttcgatcacagctcactgcagcctctaactcctgggctcaagagatcctcctgcctcagcctccaaagtagctgggactataatcccagcactttgggaggccaaggtgggtggatcacctgaggtcaggagttcaagaccagcctgaccaacatggtgaaaccccgtctctactaaaaatacaaaacatagttgggcatggtggcacacgcctgtaatcccagtactggggagtctgaggcaggagaatcactcgaacatgggaggcagaggttgcagtgagccaagatcacaccactgcactccagcctgggcaacagtgtgggactccatctcaaaaataaataaataaaaacagtgttctagtttttttcagttttcatttatctgttgaaattcctcacctgttaatgcatattgactaaacatacccatcacagttatttttatttatttatttgtttttttgagatggagtctagctctgtcacccaggctggagtacagtgatgtaatctcagctcactgcaagctctgcctcccgggttcgagcgattctcctgcctcagcctcccgagtaactgggaccacaggcacctgccaccatgcccagctaatttttgtatttttagtagagatggggtttcaccttgttggccaggctggtctcgaactcctgacctcatgatccgctcacctcggcctcccagagtgctgggattgcaggagtgagtcaccgcacctggcctgtgagttattttaaagtccctgtgcaacagtgtcaacattggagtcatctcaaagttggattctattaattgttttatcacatggccatggttcattttaccttccttccttgctatctcataaattttaattgaatttcagacactgtgtccagagaataatagagacggaggcaggtagcctttatgccccagatggctttggatccccttcttctgggtatgaatgtgggatctgtgccagcctgggccatgggtgggccgggtcagggtgaggtgtggccgccattacctcagggcgtcagagactgcgaggcctcctaggcaagctcacccttacctggtgctgaagcctggggctggggaccagggaggattttcttttttctttttttgagacagagttttgttctgtcgcccaggatggagtgcagtggcgtgatctcagctcactgcaagctccacctcccgggttcatgccatcctcctgtctcagcctcccaagtaggtgggactacaggcgtgtatcaccacgctgggctaatttttttgtatttttattagagatggggttttgccacgttggccaggctggtttcgaactcctgacctcgtgatctgcccgccttggcctcccaaagtgctgggattacaggtgtgagccaccacgcccggccccagggagggtttcctcagtgcccctacagctccattgcagcaggcccttcatgcctgaaccacagaggtggttttctccatgttcttgccccttcgttcattttacgcaacagatatctattgagcaactgccatgtgccagacactgagctcaagtatggtttattctagcgaggcaggaagagcagtgggtctatttatgtgattctggaaattcacaaaggatgaaacctatgactactcaagtattagctgcaaaagctggtaaagttcaacaaagttcgaaagcttgctatggttcagcattcgtttatgttagaaaaaaagaaaaacttgaaaagctattaatatctaacttctgaagaatatccctcgggaagtgatattaaaagtcacatagaaacattaggagaagcagctactacctgtcttattaaacattgttttgaatgatagcattgggacacactaaaaactaaatacagttcaaaatatttaaaaggaagaaatgaaacaactagaacaaaagctgagtaaagatacaacattataaatcaacggattttctagacactatgtagagaaaataccacatgacaacatttcccatttataattttaaaattatagaattctatgggcagccgggcacagtggctcacacctgtaatcccagtactttgggaggctgaggaggccaggtcacttgaggtcaagagttcgaaaccaccctggccaacatggcgaaacccagtctctactaaaaatacaaaaacttagctcggcatggtggctcatgcctataatcccaactgcttgggaggctgaggcaggggaatcacttgaacccaggaggcggaggttgcaatgtgccaagattacaccattgcactccagcctgggcaatgagagtgaaaccccatctcaaaaaaaaaaaaaaaaaaagcctcctacccataagatgtaaataaatggagagatataacaggcttcttgattgagaacacttacaacttcaggtctctaaaaatcaacctatggatttaattatattccaattaaaataaataattacttttatcttgccaagttttctctaaaattctcatcaaaatgtataggcaagtgtagccattaaattttggggggatgtctttataatttttttaaatttttatagccattaaaaatttaaaagcaaaatataaaggaagaagaatgagtggtgatttcccagacagctatcagaacagactataaagctacagttattaaaacagcactgccttgcttctggattacataaattgaaggaggaagtggagccgggccctggcagccttctcagtgtaactcaggaccccgtggacggggtgtctgagccagcaggaagagacagggcctgctgcagaggacgtaacaacagaaccacgcacctgcagcaaggcagtcccatctccgtctcagctgagacacagagcaaccacccagctaggcagtcccatctcagctggagcacatccacgaggaatccaaatgcacacaaaaaaataaaagtacaaaattcctggaaggacatgtggggaatgtattcccgatattgggggggccttaaagcatggcgcgaaacacaagcattgttaacggagtgtctgggagatttcactgtttcaaaaggaaacacttctttattgaaaatcacagtaaaaaaatgacatagtacagattcagagaaaatgtttcttacaaatataacaataaaaattaatatctctgatatccaaattgattatacaaatcaatagcagctcagtagaaaaatggactaaacgtatgaatattaattctcacactttttatggaataatgtttagaaaaagaaaaactttaaaattcacagaggggctaagttttagggaatagttttgagtgtcatctatatagtttttctcaataaatatattaatgtagtaaattacattgagtgcttttatattttaatttagtttttcctaaattgatctagatagattttttatcaaaaataccaggaatacatattaatcaacacaccaaaatatcaaaaatattttttattagataaattgattctaaaatgtgtacaaaggggcaaaggaactagaatagctaaatgataaaagaagaagaaaggaagaatcgtgcccctcaatgttaagagttactcaaaagctcccgtaatcaagagtgtcaccgtgggtgtgggcacagcagctcatgcatgtaatcctagcactttgggagcctgaggaaggaggatctcttgaggctagagttctagacctgcctgggctacatagtgagacctcatctctaaaattaaaaaaaaaaaaattaattaaaattaaaaaaatagaaaattgaaaaagagagtgtcaccccagggaagagagagagtggaggtaaaggggcgtgcagacccccaggatcacggccacctggcctcccacaagggaccaagagccgtcaatgccagaagagccgctttcccaacaagccatgctagagcagactcatgggttcaaaaatggccgtagacctacacgttcatatgaaaattaactcaaactggggctgggcacagtggctcatgcctgtaatcccagcactttgggaggccgaggctggcagatcacttgagatcgggagttcgaaaccagcctggccaacatggtgaaaccctgtctctatgaaaaatacaaaaattagctgggcgtggtggcaggcacctgtaatcccagctacttgggaggctgaggcaggagaatcgcttgaacccaggaggcagaggttgcagtgagccaagatcatgccactgcactccagtctgggcaacagagagagactcgtctcgaaataaataaatacattaataaacaaaaattatccaggcgtggtggcaggcacctgtaatcccagctacttgggaggctgagacatgagaatcatttaaacctgggggttggaggtcgcagtgagccaagatcacgccactgaactccagcctgggagacagagtaagactccgtccccccccaaaaaaaaaaaaaaagtaaaaataaaggaaattaactcaaattggatcaaaaacaataacacttttagaatagaagaaagtgtccaggacctggggcttggcaaggacttcctagatataacatcaaaagcatgattcatatatattttaaatcaatgaattagatctcattgaaattaaaaacttttatgccgtgaaagatcctgttaggatggatgaaaagataagctgtgggctgggagaaaatgtttgcaaaacccatgtctgacaaaggactcgtatctagaatataagaagaactctcaaaactcaacggaacagggccaaataatccaatgaaagaaggatcatggagacaaggtggagatggcagatgaagtcacaaaacggccttcaacccgcgtggccccagggaaacacaggctgggaccatgacccaatatttctccgtacctattagaacagctaacgcaaaatataataacaagaccaaatgctggcagagattcggagaaacggtatgacattcactgcgtgtggaatgtaacatggcgcacccaccatggaaaagagtttgacagtttcttaaaaaagcgaaacagactctgaccatttgacccagcagtcacactcctgggcatttgtcccagagaaagaaagatttatgttcacacaaacacctatacgtgattgctcatggcagcgctatttgtaatagtcaaaagcttcagtaggtgaatggtaaacaaagaggtcctttcctaccaggggaggctacttatcagtaaaaaggaactaactgttgacacaggaagcagcttagatggtctcaagggcatgttcctgagtgaagagctcatctgaaagggtcccacgcattccatttacatcacatttgcaaaatgacaaatttatagccataggaaaaggccagagggtgtgaggaggaaggaacggggacatgggcagtgagtctctgggatgaggcagccccggagatggccgtggcagtgggacagctctgtgtcctgttcctggtggtgtgtacacaaattcccacatcctacaacatggcaaaaacccagatacacacactgtagcacggtcagcttcctggcttagacacgcactccagctaagggagacgaagccgttgggaaaactggttgaggggcatgtggaaatctctgtactagttttgagacttcctgtgaatctgtaatgatttcaaaataaaatctttaaaagaaatcacgagcttgataaagagaatatacattgtatgctgccttttgaataaaaaaaaaattagacatgcaggtattccgttattgttgcaaacagaaaccacgggaagaaggagacagaactcatggactcggtgagtggagaacagaaagtttgagcgtctgaggttacttaacgatttcacatttaaaaattatttaaattaagtaaaaaaggatacagaacacataaatggaacacaagaaaacaaacaaatgggcattttcaacgcataaatgtttaggagtggagaccgaccaagagccgccttgcaccgcaaatgggccctgaggtccagggctgcaggagcagggtggggagcccggccagatggaggggcagacaccggcacccgctgcctacgtcaccgccctcagtgctgcccacaagcgggtgccccactgggtcccgccaccccaaatcccagtgccggagcggggcccggctctgccacccgctgccacccggtgtggcacccaggccctgctggcacaaggccacggctaatctgctctcagaggaagctgaggaggtgaggaggcagccctgccctcggtgtttcccaagcccccttatcccagcagattcttctcggggaagataagctcccagcttagccagggcgggtgggaagtcagagctgcttccttaattggcattttccagttgagagcacattctctacctttttcacttggatcagctaattgccaaatgttttcatttttgagaagaagtaaaattgcagagatttgggatttagggaaggaatgcaaggatcaattttgcctaattacgaaatgtctcggcggtcactgtgacgggtcccagagtcggccgtgtggaccccggggcctcccgggcggtggggggccgggggctctgatgcagatgtttacctgatgtcgtgggcctgaatctggtttacattggaaatcagactgtttacaggccagcacatctgcctcttcctctggctctccttcattctgctgtaatgttctgcaggtctcgctggggtctctgtgggaatatctgtgacacggagtgagccaggccagcccggggcggccccatccggggacagcagctcacggcctggccccgcgtgcgcagccggggcctgggttggcggtggagatggggagggtctgggggcccctgggtgggtggtgggggtaccgtcagcccggctgcagggttccagcggaggacagggagccttctccatccctgaaaaccatcgcggggacagtggactcatcaggatgccgggaccctctagtgtgttctggaagcagaggctgggtgtgggcacgggaacctgtgattgtccccagacaccgagaggcccacaggacccccagtgcccagaccccggctgcagatcggggggtccagtcatgtgtcggggaaggaggaggggagcaggggccacagacagggggtccaggagggcagggggtccaggagggcagaggacccaggacagcaaagggtccgggagggcagaggatccaggaggacagggggtccaggagggcagggggtccaggagggcccaggagggcagggggtccaggaggacagggggtcctggagggcagggggtccaggagggcagggggtccaggagggcagagggtccaggagggcagagggtccaggagggcccaggagggcagggggtccaggaggacagggggtcctggagggcagggggtccaggagggcagggggtccaggagggcagagggtccaggagggcccaggagggcagggggtccaggaggacagggggtcctggagggcagggggtcccggagggcagagggtcctggagggcagggggtcccggagggcagagggtcctggagggcagggggtccaggagggcagggggtccaggagggcagagggtcctggagggcagggggtccaggagggcagggggtccaggagggcccaggagggaagggggtccaggaggacagggggtccaggagggcagagccacagcaggctgggtgctgctgctacagggggcttcaccccagcagccccctgcactgcccctctgacagcctccacctttgaccccccagaacaatgggctgctgtggcggctctggaggctgcggccccagtcatggggcctgcggctgccatgggctgagaccctgctgctcttcgtggagacactgatgtccttaccagatctcccgggcccgccctcagcctccaggctgaccaggcttcctgggcctcctaggacacagccctgggtctcctcctctaggatactggatgggaatctgcggcttccaacatccacctgcccgccttcccctctgccctgtccccttgctgccatggccgcctttgtcctccctggagattcagagagcagccccgttctcagttacctggccttctgggtccttgggaggttctgacctcttcccagcaggggccctgggggctgcgtcctgcctggtccaggccttctcaccctcacctccctctgggctcagggagctggggccacacagcccagagaggctggtctgcccaggacaggccaccctcctcctgctcccaggagtgcctgcagccctgtcagtttccaagagtgtctccttcaagcagcctcgtcaggtcgagccacccccagtgccctctctcctctggcagccgcgctccctgcccttcctccccacctgctcagtcctgcaaagcctcctgcctagctggacacctgggggttctgtatcccacactccaggggcctccttcacatgtcggtgacctctgacactccaggggcctccttcacatgtcggtgacctctgaccgctgtttcagacccacagctcctgggtgcactcagccttgggtcccgatggcaccagagtgttccacgcctggggcagcgcactcattgcagatctggcctgagactcagcagccgggcaccccatgagatctactttctgaatggcgtcgtcacctgactgggcatacaggccacggaccccatggtcatttgggcactgacccctctcacaccccccaaatcccacctgagagcagcccatcaggcaggccccatatattggatgcctctaagtatcagccttgatgtccctctaattccagccctggtgtcttctccctgggacaccctgctgctccctctagctgtgccctccacggtgactccagacatgcggattcagcctcttcgctccaggaccaaactcctcagcagctcccactactcccagcatgccatccagctcctcagcccagcagcaaagacaggcacagaatggctcccgaacccatcgctccggtccggagaaggagccctccaccctccacgctccattcgctgtccccttgcgggcccctgtgaggaaccccagccagaggcaccaatggccgccactgactttcaccctgtcctgaatcacaggaccaaggaggctgccccgacaagggtcgcttccagactcactccctgtcagccactgccacatgcctgccgtgggcagcattggaggacagggggtactctgtcagtcagcctaacaggctggtccgtccttccttccttccttccttcttccctccctcacttccttccttcttccctccctgcctccctcccttccttctctgctccctccctccctcctccctccccctccttccctgcctccctcctccctccttctctgcctccttcctcccccttcccttccttccttccttctctgctccccccctccctctttccctccctccctctttccctcccttcctcctccctcctcctccctccctcccttccttccttctttctttccttccttccttcctgcttctctcccttcctccctccctcacttccttccttccttcttccctccctgcctccctcccttccttctctgctccctccctccccccttccctgcctccctcttccctccttctttgcctcctccctcccccttcccttccttccttccttctctgctacctccctccctcctccctcccccctcccttccttccttcctctctggtcaaatgcgggtacatgagagttcccaccatccccatggtaagtgcacagttccgtggcattgggaacctgcacgtggctgtgccactgtcgccaccatgcagctccagcaccttttcatcgcgcgaaactggagctccgtcctgactaatcactcactcccatcggcctctgtcactggccctgctgactaccattctgccatcttcctcttgaatctgactcctctgggggccttccatctgtggggtcacagcattggtcctattgtgactggctggcttcactcggcacgaggctgtgaaggttggtggcgttgctgcaggcgtcagagcacactccttttccaggctccgtaagaccccgatgtgtttgtctaccccatttcagatcccctcacctgctgggttgtttccacctttgggctattgtgactgcacggctgtgagcatgggtgtctgagtccattctgtgtagccataaaagaacctctgtgatggggtaattcatcaagctcacagttctgctggctgagaagttcaatggcatggccctggcttctgctggaggaggtcaaaggggaagcagacacgggaagagagataaagctcagggatgtcttggcttcagaacaagccccactcatgggaacaaatccattcccatgggaactcaccctgtatcacaagaggagaatcactcccagcaccacggactccccagggagtcactcccacgacccacacgtctccctcccctcaggccccacctccctacgctgccacactgggggtcccgtttcaacaagagttttgctgggaacagatgcactgactacatccaggtcgtggtaagggctgtgcaagtatttgagtccctgctttgatttcttttggggatagacctaggaatggaatggcggcttcgcagggtaattttgtgtttacctgtttctggaaggagcacactgagctggccagagcaggcttgtgttttcctctgtgctccttcctgcttcccaggatgcagatgagatggcaggtgccccagcagccctcgccaaccataaggcatggattcctcaccttcggctcggggagcacagagactgagggccgtggactcggggtgagatggtggcacctccatcacagacccacagtctctgtgtccagcccttccggaaagatgacagaaatgaaaagtctgccttatggaagacaaggttattcagaattttcggttctgtatggtctccttagaaacattagcagactttaaaaaatgaaaatagcccatgttcattgtgaaaaagtgagccatggcctccggggcaccggagccacagagccaccacgctttgcttttgtttctcactcccctactctccccacataggcaccgacgctttccctgacagcatcatcatcacccaactagggcagctgacccgcgtcttcctcacgacgtggaatggtttgagtcaagggttttcatggccatgagccacgtggaggctgtgccttttgtttcctgtgagaaatcttcaaccagcgccactctcagcctcccctctgccagcgcttctgtggctgcacctgcattcgtgggctgtggctgcgaagcacaggaataattgatggctctggggcactttgctgggctgcttccagaaaagttgacccctccctgcaaaccagcactgcccagcattcttgtcccgccaagcctgactgtgagctgttgtgacgttgccactttgctcggaaaggaccccttaccttttatttcccttgcatttctttcaattctaccattgaccatttctcatacgtgtggtcatcattgtatttcgcccccattttgtgaggtttagtgtattcttaaagtttcctgggttttgatgagagcatattctgtcattatatttaacaggtgttttccccagcttggatgtgtttggccattagcttcttttctgctattttacactagtctgttattcttcactacaaaaggactctgccgagggtccccatgctccccatgcttcggggtgtgaggtagcaggggaaggcaggtgtccttccttctttgaagtgcgggttggggcaggacagcagaccctggggtcactgctgaggaggggaaggatgggattaggactgttctcttcctggcctcatgagctcccccagctccttctggtggttggagaagaaacctcctgattgtcacggagagtgagtttgtccgtggagcttttcctgcacggctcacatagaacgggctgtgaggtccctccactgagcagcacgtgccaggccgggtgcccacgactgttgggaaaacccaggcctgtattccaggaagcaaaggtctttagatgaaggttttaagaatgaaaattaacccacagaatggtgaggtcagttggagcctggattccatggggtaagacagccacagccaggtgggcatcctgctccttccctttcccctgtccctgcccaccggccatgccctagagtaggggcacactcggaccccagcccagcgcccacccatgctgcctgcaggcctgcgaggtcccacaaccccttggcatgcagcgacagcccggggccaggtgtgggtgaggcttgggatttcctggcacagctgacttcatgttgtggcctggcagcctcgggtggtgtcggcagatgcaggaagccacgggcgcagctccctgcctgtcccggccgtgggtgctaatgcagagtgggttctgtggctggtcacacaggcagccgggtgggtgcaggtcatcccggggatggccttgcactgtctgatccccggggaggggagggtcttttcgctgaccacgctgtttgctgcgtgctttttgtttgccaagggctgcaatgtttgtcgtctgccgcagtgtttgctgccgggtgaagaatcgctggccctgtgttgtcacctgggcccaccgtgacaaggtccccacctctgttgtgggactcgggggcaaagttccctgctgttcacgctgcaagtgacaagggccttggtctctgaaccaggagcctctgagtcctgccccacagggctgagccctggctgggagcaatgttctttgggggagacagcagcttcctcacttccatgtacagccagatgccacgggatgtggggagtgcgacagggccgtggggagtgtgacaaggccttggggagtgtgacagggctgtggggagtgtgacagggccttggggagtttgacagggccgtggggagtgtgacagagccgtggggagtgggacaaggccgtggggagtgggacagggccgtggggaatgggacagggccgtggggagtgtgacagggccatggggagtttgacagggccgtggggagtgggacagggctgtggggagtgcgacaggtctgtggcgagtgtgacagggctgtggggagtgcgacagggctgtggggagttttgaaagggccatggggagttttgacagggctgtgcggagtgtgacagggctgtgcggagtgtgacagggatgtggggagtgcgacagggctgtggggagtgtgacagggctgtggggagtgtgacagggctgtgggaagtgcgacaggtctgtggcgagtgtgacagagctgtggggagtgcaacaggtctgtggcgagtgtgacagagctgtggggagttttgacacgtctgtggggagtgcaacagggctgtggggagtgtgacagggctgtggggagtgcgacagggctgtggggaatgtgacggggctgtgtgggagcaggtggtcctgtggggcatcccggggtctgtgctcaggctgtgggaggtggggctggcaggggatcctggagaaacacctttgggggctcaggtttggtggagctcccacttccacagtggctctgagtggggcctgagcaggttttcctggcagtggctgagggtgggtgggcctggtaggtactgggctgctcagaagccagccagctccatgttgcccacctcagcctcccaggcttctcagggcccagctgtgctctgtccctggggcccttccctccccggacactgctcacccctggcaagggctctgccctgggacacaccctgctagaccctcagatctgatcccagcccttcccatgtgactccctgggtgctcccagatgactgggatgtggggaaggatcaaagagcactttggttgtctctgtaactcttctagtgattagataagggctggatttaaggattacttctgcaatgcaaatagatgaaaggaacaagctaaataacaaactcttcccattcccagaacaaagtcagctctggcctggttccacgtgccctgtccagcacgtcccccaagcgcaggcatgggcccccggaccagccgcggacccctcctcgcgctttgcaacgcctcacagctggccccgcacccctggggcaggaccactccctcttcttattcttctctgtgtcaccttcccagactctgcacatagtcggcgctacataaatggtggctgcaaaaaggagacgagcagcagagcaatgccccagggaacaagaggggcgctgttgccaaggccagggccagggtatctgccctgaggcctgagccccacacgacccagggctccagagccccatggcccatctcactgctggggctgaacccccagggcccctgcagccactgcctcaggaggtcaggttggggtgtggagtaggagggacgggtgtttccagggaatccctgtgtaggtgggatccagagggcttgaaaccctcaagctaccagccagctccacgcctaggacaggccttattagagttcaggatctgccagctcccaggggcagcctcaatgtccggggtggatgggggtttctgtgggttcacttctgcccccagctgggatgcctggaaggagagctcagggacagtgtggccagaccctgacccagacagaagattctgtctgagagaccggggaccttcacagagggacagaggcccaggaagcagcggctgctgctgtaagcctacggcgagagccatggtcacagaagacccacttgttgccaggcgttttgccttcacaatggcaaagtctcccagtggcccaggagaaaagggaatgctcattccattctgcctgccagaaaacagaggctgaggcccagaggctcaggcaacctccccaggttcacctcatttggaaacagccccttcccatccccggttgctgccgcaatcttctaaggggacttcctcagaggtcattaaatgcattgaaaactggttctggtcctcgaccctaagctgctggaggagggggtgtgggagcagattcggggtgcacctgtgtgttcaggtgaaggcggagggaaattagtcatggagctaagctgaaccacctgctgggccccaggcaggcaaggccctgtgggcaggtgggaagccagaggccgcctctcaccccggggaggggcaggggctggagtgacggtgcagggtgagattttggccaggcacaactccatccatccctgcatccccaggaagccacagacacccaggttctgagagcccggctctcgaatgtccctcctcccccgacctccttcggtgcccctggccatgccagccctgagcatgaagccttcaactttcccacgcacccacttccactctccagggctgaggagcaggaaggagatggcttggaggggtgagcccctgtcctgttctcagagggtcacagctactcactacctgctacgaagacagggaagggtgggagccgttctaaaccagcatcagtgcatgccacaaaatagaagccgtgcattacaaactagaaacgagggcttggttgcaggcaccttccctagagaccctggctgagcagaggctggggtctggctgcgctgctctgacggtgtgcacgggcgggctaggcactcgccctgagtcccagaaagaggagcccacagatacaaaacttaaaggatgtgttattttattttttaatttaatttttgttttttcaaaagcatcaaagtcattgtgattggaaggaatgcgcaagttggtctggggtgctgtccctgggcgccgaaccagccggggacatggcccctggagagctgccgaccccggggctaggggagtggtcttgcgaggagcctttgcttcccactcgccggccgccccgcggggccctcctgccaccaggtggcgcttctcggccagcccgggccgcaggacctgcagtctcgtttccccaggaatggcgacggccctgttattcccatcacaattttacaggtcagaaaaggagactcggagtgcatatatagcaacttggagaaagtcgcaagggacgaaggacccttccccggacacaggaaccttctgggggatggggacagggactcaggtgcagagaaaaccagagctgctaccgtggggacagaaagggagtctacccagagacagcagaggcaggagctgccccccctctttgcccccagtggccccgagcgaggggttgccaccacctagagcctggggaccaggggccagtgcctggggacggaggccgtggtcgagacaggcgagggatgtggcggagacagggaggcccaggtcggctggcacagggcaaggagcaggcgagccgaccccagggccttgcccttgtcacgccccctgccatgttcctgctggcccccttcctgttctgtgaggtcaacacgcaggagaaaggggcagaagggaaggtctccccacaccgagggctctgcccgcttgggccaggggttggggggtggtcatggcaccagggctgctctgagctacagccccgagggggggccgggcgatgcctcctcctccgtgccagcctgtgccggggcccctaggaacccccaagtccctgcctgtgacctctgcagagcccagcaggcgcctccccgccctcggccacaggctcggagctcacggcccccagggggcgctcaaggactgctcatctgcgcttctgccgcgggcagctctgacccctcccgctgcgctcctccagccgcatccctgcagccttgggccctactggcccgggggaggaggcactgcgctttggggaggaagagagactaaaggggagaccgagaaccccgggtcaggaagcggagagctaaaacgacaaccgtgggtcagcggaggccggcaacttcatttcatgacctctggcctccaaagcagctctgcaaagtggtcaatgctcctctcgttgtgtagatgaagatactgagggccagggaggctgtggactgcctgatgtcacacgactggtggggcggcgggcgggtctgtccccaggcgattgtcctcgaggcacacggcggggcagagcttggaagcggccgaggtgggggtccctgggtgtggatgtagtgaccccggagccacgtggagccaccttcagacccagagctgaagcaggagggtgaccggtagagcaaggccgtgcacacccccgttgcagaattgaaaacgcgcctcaaaataaaaccccgtgtttcacaagaatgcactaattcccgaagatatccgggcgcacgggatgcagtggggattggagatgcaggggccatgcaagtgagaaggaccctgctcagcgtgaggctctgatggtcttgaattcctttgccatgctcggacaaggggcctgcgctgtcacgttgctttggaccctgaaaattcgggagcccgtcctgagcccacgctgccatagttgccaggtatccagcatatgcacaaaacacctccacgccggtgctctgccctgccctgctctggagacccacatccaaggacaggtctctcctatggcagccctgctccctgcccttcttccccacctgctcagtcctgcaaagccttcggccaagactgacacctgggggttctgtctcccacactctaggggcctcctccacatgtcggtgacctctgaccactgtttcagacccacagctcctgggtgcactcagcattgggtccctatggtatcagagtgttccaggcctggggcactgcactcactgcagacctggcctgagattcagcagctgggcaccctatgagatctagtttctgaatggcgtcgtcacctgactgggcatacaagccacaggccccgtggtctgtgggcggccattgtcctgtgtgtggggtggggcactgggaccctcccacagctttggctttctcagagtttctatccctgtgtcctcctctgtcagcaaagcccaaaggtggggggctcctgagctgccacctcctttgtttctccaactctgccggttcattggactatgcccttggtgcctcacagtgtgctgactgacagcatctctaagccctaaaccactgagcctggagtcatccagctccagggaaatgactctgcagggtcacgattcctgggtctgcactcaggccccctctttccaaccaagacagcaggatcccaggtatcctgagacctgtcctgatcctgaatcctgtcctgatcctgagtcctgtcttgatcttgggtcctgacctgatcctgccctgagtcctgtcctgatcctgggtcctaccctgatcctgtgtcctgccctgatcctgagacctgccctgatcctgggtcctgtcctgatcctgattcctgccctgatcctgtggtcctgccctgatactgagacctgccctgatcctgggttctgccctgatcctgagtcctgtcctgatcctgggtcctgtcctgatcctgagacctgccccgatcctgagtcctgtcctgatcctgccctgatcctgagtcctattgtgattcaaagtgctgtcttgatcctgcgtcctgccctgatcctgagtcctgtcctgatcctgccctgatcctgggtcctgccctgattctgagtcctgtcctgatcctgggtcctgcctgatcctgagacctgccctaatgctgagtcctgttctgatcctgagtcctgttttgatcctgagtcctgtcttgatcctggttcctgccctgtttctgagtcctgtcctgagcctgccctgatcctgagtcctattctgatcctgagtatttcctgatcctggctcttatgagatcctgggtttcatcctgttctacccacgggtgatagcccaggatggggtcacctgctctagggtgtctccatgcgtggtctccctgtgccttctgtaaacttcccctgagactttcggagtcaagtcagcatcagcatcagcatagaagtgggttgaataggaccccctcattcctgtccacctggaaactctgaatgtgatcttatttggacactgggtctttgcagatgtaatcaagttaagatgaggttgtactggagtagggtgggccctgatccaatgtctggtgtccctgtaagagaaaggaggggaggaggtcagacacagacactcagtggagaagcccacttgaggatggaggcagagacgggggatgcagccacaagccaagaatgtctggccaccaccagaagctggaagacgcagaaaggatccttccctggagccttcagagagtgtgtggcccacggagaacttgatcttgaacttctgtctgcctgaaccgcgaggcaccaatgtccgctttaaggctcccgttgggggccatttgttatggcagccccaggaaatgaacactggtagcaaagatgagcgcagcatcaaagccaagtccctgctcccgttgcccttactaacacagaaggacaggggccttgtcatttttcagaggacatgtgagggaaatcatgaactaaagaaaaagtgcaaaactatgtacaccactgaggttattttaagattaagcaaacaaacacagtttccctaaggaaatggcacaaacaggaaccaggaaatgactgtgtgtccagcatcacacctgatcctgggcagggatataaagggcccaggctcagggagctccatacctgcacacctccctctcacctgctcctctacctgctccaccctcaatccaccagaaccatgggctgctgtggctgctctggaggctgtggctccggctgtgggggctgtggctctggctgtgggggctgtgggtccagctgctgtgtgcccatctgctgctgcaagcccgtgtgctgctgtgtgccagcctgttcctgcaccagctgtggctcttgtgggggctccaaggggtgctgtggctcttgtgggggctccaaagggggctgtggctcttgtgggggctccaagggaggctgtggctcttgtggctgctcccagtgcagttgctgcaagccctgctactgttcctcaggctgtgggtcatcctgctgccagtccagctgctgcaagccctgctgttcccaggccagctgctgtgtccccatttgctgccagtgcaaaatctgaggctctgactttggacctcaggtgagtccagcatatccacaccacccaagaagtgaccagtgctgcatttcagttctggctgtcccacagctccaggagttgtgtcccctgaattttgcagaaggtgatgactccaggttcttggcctttcctgactccctttctggtcattcttcatgagaactctcttcctctctcctggtgcccaacaccttcccagttcccagagccctgcaatctcctccaacaagctccctgccaggtcctgctgcgacagggccctccctgtccatcagtcctcctgtcctccttctctagagcagctgcaggtcggggaggcagtggagatctgcccccatccccaaaggctccaaaccttcctccccaggagacggccactctcgcggcttctctctcagttaaggttcagcaggacctgagaccctttaaataaacacatttcccacccatgaggcttgctctcactgtggctttaaaacaaacaaacaaacaaacaaaaaaaacttttatttgaggttcagggagcatgtgcagatttgttacacaggtaaactcgtgtcatgggggtttgttgtacaaattatttcatcactaaaccaagtacccattagttatttttcctgatcctctccctcctcccaccgtccaccctccgataggccccagtgtgttgctcccctctgtgtgtccatgtgctctcctcattccacccccacttgtaagtgagaatatccagtatttggttttctgttcctgagttagtttgctaaggataatagcctccagctccatccatgttcctgccaataacacgatctcattctttgttatggctgcatagtattccatggtgtatatgtgccacattttctttatccagtctacaattgatgggcattttggttgattccttgtttttactgttgtgaattgggctgtaataaacgtgtgcatgtgtgtttatgatagaatgatttatgagtccagcagcacatcaaaaagcttatccaccacgatcaagtaggccttacccctatgatgcaaggttggttcaacctacacaaatgaataaatgtgattcattacataaacggaactaaagacaaaagccacatgatcatctcaatacaggcagaaaaggcttttgttaaaattcaacatcccttcattttattttttatttttttgagatggagtctcgctctgttgcccaggctggagtgcagtggtgtgatcttggctcactgcaaactccatctcccaggttcaagtgattctcctgcctcagcctcccgagtagctgggattacaggtttctgccaccatgcccggctaatttttgtatttttagtacagacggggtttcttttttttttttttttgagacggagtctcactctgtcgcccaggctggagtacagtggtgcaatctcggctcactgcaagctccacctcccgggttcacaccattctcctgcctcagcctcctgagtagctgggactacaggcacctgccaccacgcccggctaatttttttttatatttttaatagagacggggtttcaccatgttagccaggatggtctcgatctcctgaccttgtgatccacccgtctctgcctcccaaagtgctgggattacaggcataagccaccgcgcccagcagagacggggtttcaccatgttggccaggctggtctcaaactcctgacctcaagtgatccgcccgccttgctctcccaaagtgctgggagtataggcgtgagccgctgtgcctggctgacatcccttcatgccagaaactctgaataaactaggtcctgaaggaacacacctcaaaataacaagcaccgcctaccactgcatctctttccctgcagctcttgcctgagtgaatctgcctgcagggtcagcccattcccggcccgtcactgaatgtgtgtttactgagctcctcctgcatcccacgtgctcacagctgacagggaatcagaaccctcccctgcagctcaggtcctgggtggagacagcctatccagtcctccagggaccacaaggtgggtgtcctttttcttgactcccatagcagctgtgactgagatgcagagctggcacacacctgggcatggccccacacgcaggtggcatgggtgcagttctaacctctcagtccgactgcaaatgctgctcataaccacaacagaacatttggccagagactgctctcctctcgggagccacactcagggacatcaccaggaagatacctcctatcccaggccccgtctcaccatggctctgacagcaaatgtgggggcagaggtagtgcagggcaggccctggggaggaccttggccagtcagtggcgccttttcctgaggccccagtatggctgccttgccagtccttcctgactgtctctgccctcagcccctgagccccaggccatcagtgacttggtggccctggggagcagcctctcatctttctgcctggccatccttggccaggaggtctccctgctgaccactccattcgggtctaatttggtgcttccagtgtgtccatggatgcattatgattcaaaaataatcatcgcactcatactcacggagtctgtatcatgttgccaggctctgagttcaatgctttgcatcctctatcccggttacggaagtgaaaaccacagagccagaatctcagcccatgtcacttggtccccaaggcctgatgctaccctgattttcttggatgccggctgcctcacccaaaaagtgtggattatgttagagtgaaagttccccaggaataaaaccacccaaaaaagaccagaaagggtagaagagacatcgatatcatggcatccagatccaggaaaatgacaaccagagagcccagcctttaatgtgagctccctagcagtcagagcaaaaagggaaagaggggacacataggcttcatcacctggaggagggagcagcacagtttacagcagaaatacgctctgtcacgtttcagagtgaagagtcagttggggtgacagctgtggaatagaggtgcccctcagggaagagggtccctcgctgctgttgccacattgtattaaaataaaactataaaaaagtggacaaggtatccatgtagaactcaataagtttccacaaaagctgaacaccttcctagaactggccctcagaacaagaaatagaacattccggcaccccagaagcacccatttctaattgctacccactccccaccaagagtaaccatgagcttgaattatcccatcagacaccagttttgtctgttactggacttcataaaacgccatcgtaggccgtgtcctctcatggccagctcctttggccccagactatgttggcgaggttcatccactgtgttgcatggaatttgccccgttcgcggctgttgctgggtcctgaattgtaagagtgcagcgcagcatgcacacgcactcagaggatttggttttaagagctgcgtgggagggtgcaatgcagaagacaagtctttgttctgcacagtgggtggttggagctcagagctgctgcccaaagcagagatcccggaagggactgtgccctctgatgggggtggctagaaggcaacccagccgctgccagaaggaagggactgtgccctctcatgggggcagctagaaggcaacccagccactgccagaaggagacagcagagaaatacgtttgctgagtctgagatgggtgataaaaacatttcctttgagaagtgacaacttcaggcccaccattatccaggtgggaggcacacattggcatcagttttgtggtccagaaaaccacaagctgagcaagtcacttaaagtggtcctgaattgataggacccagagcagcccggtggaaggaagtgcagcaaaacttcagacaaagtctgtgtcctcagccaaggccctgagctccccacctacagccgaggcaaacatgagctcacagcagaaaaccacaagcacacaaggaaagcagccaccgtgggcaagagccagcacccgcagtcagagacacatggagacaccaagggccatgaatgaggacatgaggagataaaataccagctaaatatttaaaacaatgggctcacccactgtcttgggaccacgaaggctcttctgagagagaaagtttcctatcctcagagttttaggtgaacatatgggtaaatctaatgggttattctcttcaaaatgtgtttgatgttgtaaacaaaaatcacaccattctctggtggggttttcaaaatgagtatttgtcatttatgagacaagtggtctctattgcgggaagattcctggattccacctaaattagtgaaatatcgattctaagtacacagtgcaaaagtaagcaatatacccgtactctagaacaaccattaaaaagatataaacaaagaatatagtcaagctggttctttgaaaagatcaacatattttttaaattttagcaagactggcaagatgaaaaagaaagaagatgcaaattaccaatatcaggaatgagaaaagggatatcacttcgggtcccacggacattaaaaggataatgcaggaatactgcacgccgcatacatttggaaactaagaggaaagggaccaattgctcgaaagacatgaaccaccaaactcaagaaggaagagggagcctgaatatctctatcaagaaacagaatttgtagttaaaagccttcccacacaaaaaaacccttcaaggccagatggtttcattggttaattctacataaccttcaaggaacaaataatctgaaagcaagcaggaaaaaatatataaatttatggataagtgtgtatgtatgcatataaaattagaaatcaatgcaatagaaaatagcaaaacaacggagaaaatttattcaaccagccaggcgtggtgattcacgcctataatcccagcacttcgggaggccgaggtgggtggatcacttgaggtcaggtgttcgagaccagcctggccaacacggcaaaaccccatctccactaaaagtacaaaaattagcctgacgtggtggcccatgattgtaatgtaagctacttgggaggctgaggcaggagaatagctgaacccaggaggcagaggttgcagagaactgagctgagatcgtgccaccacactccagcccgggcaacagagtgaaattccatctcaaaaaaataaaaaaaataaaacaagaaaattaattaaaccaaaatctggttctttgaaaagatcaataaagatcaataaataaagatcaaaaaagataagcctgtagcaagacagacaagaaaaaagagcagacacacatgaccgaggtgtgtgtgggatatcaccatgttggccaggctggtctcaaactcctgacctcaggtgatccacctgccttggcctcccaaagtgctgggattacaggagtgagcgtgcccggcccaaaactgttctatatgatactgtgatggtgaataaatggcattccacgttcatcatttgtgttgtagaacgtacaacatgaagagtggaggtgaaggttaggtctggactttgggtgctcaccacgtgtcaatgttggctcatcaatgatgacaaatgggccaccctagtgtaggatgctaacagcaggggacgttatgtaggtgtggcagcaggtgaaatacggtaattttctatacattcaactcaattttgctgtgaacctaaaactgccctaaaacatagtgtgttttctgaaatacgtccaaaaataaaaagttataaatctaacaaaatatgtacagaatgcacatgttataaatacaaaacactgatgaaaggaatcaaaaaatacctaaataagtggagagagtcgtgcattcatagatttgaagacacaaaataataaagacgtcaacttccccaaaactgatgtgcagatttaattggattccaacaacaatcttagcaggattttttggtagatattcataagctgtttatgaaatttatgaggaaaggcaaaagaaaatagaataacctcaaggatctagaactagaaataccatttcacccagccatcccattactgggtatatacccaaaggattataaatcatgctgctataaagacacatgcacacgtatgtttattgcagcactattcacaatagcaaagacttggagccaacccaaatatccatcaatgatagactggattaagaaaatgtggcacatatacaccatggaatactatgcagctataaaaaatgatgagttcatgtcctttgtagggacatggatgaaactgaaaaccatcattctcagcaaactatcgcaaggacagaaaaccaaacaccacatgttctcactcataggtgggaactgaacaatgagaacacttggacacaggaaggggaacatcacacactggggcctgtcgtggggtggggggaggggggagggagagcattaggagatatacctaatgtaaatgacgagttaacgggtacagcacaccaacatggcacatgtatacatatgtaacaaacctgcacgttgtgcacatgtaccctagaacttaaagtgtaataagaaaacatttaaaaaagaaaagaaaatagaatagccaaaacaattttgaaacaagaaatatagttggaagaatgacattagctgactttgagacattccataaagcgacagcaatgtagacagtgtggtatgggcagaggggtagacacacagatcaagggaaaagcacggagttgagatgtcactcgcacacacaagactgcgctaatttatgacaaaggggcaagacaactaaatggagaagtgtctgctgcaatcacaaaatacctgtgactgggtattttacaaacaatagaagtacatttctcacagttttggaggctagacgtccccagatcaaggtgccagtattctgcatctggtggaggctctttgctgtgtccttttggtggaaaacataaggggcaaaaaggacccaagctcatcccccccagccctttaatgaggcactaatctatgcctgagagcaaagccctgacttgatcacttctcaagagaccccacctcttagtaacaccataacaggggttaagttacagcgcatgaattttggggaacgcattcataccagcgcgcgaaaggagaaccgtttccaaaaaatggcattggaacaattgaaccgccgtagacaaaacgaaaacaaaacctcaacctcaacctcatactttatataaaattaactctatgcccatcatagacctaaatgttgaatataaaacaataaaacatttggaataaaacaggagaaagtcttagtgaccttgaataataaaaacacactgtgtaagaaataataatgtgagtgaaattcagtgtcctttaaagataaaaggtcacgtcataaggagagagacacacttggcagtgctcctggttgctggtggaggaccaagtgagtccttatttagaagggacattttttttttctgtgccattttcttcatcgaacatttagtcctttgaaagcttgtgattatcttatgttcaaatgctatgaaataataaagtcacagggcagtcccactgcagcgtgacaatgagggggaactccagagatccacttccatgtgaaactggtgaagactttaaaaacaaaaacaaacgaaaccccacccccaacaaccatttaaagcatctgcaaatggccctgtagccatttcaaatagagaaacatttattcaagaaaatcgactaaagcttagtgagaactgtgtgagtctgtggtatctgagccaatgcgtgtgccctctcccagcccagtgagacagaagctccactccaggctgtacagccaggaatgcaagactatctctcctccagtttctgtaattgcccgacaggctcttcccgcccgctgcacagacaaaaccagttcactctgagaacatggtattgcagtaaatgaaatgtttaattaacgcaaggcctgccaggtggaagaactggaatgatcactcaaacccgtctccctgaaggcttgaaggttagggtttttccaggacagtgtggtgggtggggggctggggaatgggtgctcctcattggttgcgggggcaatcacaggggtgtggaaaatggtccttgtgccctgaatctgcctctgggtggataacaaccccaaagtgaaagcaacccagacatccttcaacgggtgaacggttaaacaagtcgtgagtcacgagtctgcatggggtcagttggaaaaccacctcaaaagaccaatcttaattctaccacagtgatattatctataggagcaactggggaagccacaaatcttgtgatctctggacaaatgactcctaagcagagggggattatagaaactatgcctatattttagcagaactcatgccctcctgtaattctaatcttgtggtctttcattagtcctataaaggcagtttcagctccccaaaaaggaggggatttgttttagggcgggaccgttatcatccttgcttacaagttaaactataaactaaattcctcccatggatataatagaggcaggaggcagacaaatcccaggcagatgggggtgggtccccagtgaaacctcaccttcaagccaaaacatcctgaaacctgcagcccagagtgaaaacttctattcttgtttgcctgctcgctccggattggttcattttgaataatgcctttttaaccaatcaaatactgccttttccaatactacctatggcctggcctgcccccgtcctgggcctataaagactccagactcagttggtagagagagagagaaggcctgacttcaaggaagagatctcctgactttggggaagacgacctgccctccctgtcccctttccagttcccctctctgctgagagctgttttcattgctcagtaaaagtctccactttcaccatccttcaatcaccagcatgacctcattcttcttggacgctggacaagagctcaggacccacagagtgcaggtacctagaaaggatgtcacccgggccctttgccctcgccagcagagggcagctgccccacgcgatgaggccaggggccgaccgagctgctaacacattgccctccattgggatgtggatggtggaactataagagctgattagagcactaacaccccctctggggcttcggggttgcgggcacccttgtctgggcactgccatgttctcctcgaggtgacacacctggtctggctgtgggccccacgtggagtttgctcccgtgtcagcgttcagagtggctggccagatcccacacttgctcgctcatgcactccctcccgcaaggggctgagcatgctgggccaagtagatgaggagcctctgctgtgagtccagcaaagaggctgagaaaaaatcctgcatcagttagcttggcctgagtccaggaataagcaaggacaaccagcctatgagccagaagcaagatggagtcagccatgctagacctctctcgctgtcaaaaggtagtttcacttccagttggtgaggctctcttcctgtgagggtcagtgtgctagcatcctgcccccagctacctgtgtctcaggctgaattctgagtgagtgtgtccgagaggtgagggtcccttcctctactcagcctcaggtctcactcatgcagcaaaggctgccctgggttcatcatgctgagaatcctgggtctcgggtctctggtcacctttgctccagcttatgggaggggttcatgctgagagaggcaagctgaggacacctggagctgctgcccatcactcaagtgtccagcttctaaagtaggcatgacaccagtgagccaagatccctgccgtcagttccagagctgtggcttagagattttgtccagggagaatggcaggatgtagaacagaggatctcctagtctctcccaaaaggaactgacttcatttgcaacagagtatgaagttcaaacctaagggtgctctcagagtcagtggcggttgtggtgaagggcaactgggagaagattgatagattctttagagacgtagcctaactctaagatggctagttttctggagagaaatggagaaagagagagctgggaagagactttctgggttagtaagaaatctcaagcactggcctttcctttcaaaggagtcagaatttgattggattagtctgtgaagcaatttattccctagggtgatgtcaaaaacaatcgagcaaccagcttgcaatgacgaatttagcagctgggtttggtcagggaaagagacgaagagagccttcccacacccccatcatatcaaggtggacctgcccactacttctcaggggaaacagactttactgcagtattccagtcattgcagctttcacctaaaagctttcacacaattgctttgggctattcataatagccccacactgaaaatccaggcgtccttcaatgggcgaacagttaaataagttggggctcgttcagcttatggaatatgtttagcaagaaaaaggaatgaactattgatacataccacagcctgctaatctccagagaatcatgctgaatgaaaaataaaaagccaattcaaaaggttacatgctgttttatttcagttacataacatccttgaaatgaaaactttatagaaatggataaccaattagtgtctcctagggtttatcgcccagggttccggcagtgatgaatgtggtctgtgttttgaaaatatcgatgccaatattctgattgtgatattgttccgtagttttgcaaggagttaccattgagggaactggataaagggttcatgatattctattatttcttacaactgcatgcaaacctaaaataatctcaaaataaaaagattaatatattaaaaaaagaattaggatacttctgctttgggtcaagatagagcaacagagaataaatatacaattgtaaatgtaaaacaacaacaacaaaaccaagacaaacacattattctcaagaggtagacaacagacaagaaaggactgggaggtgagccctgggacgtgagcccttcagtggccccaggtttcagccctcagagtgtttccaggtcatggcgcagggagaggagaccccggggaagctcagtgtattccttgagttgagcatttgtgaagaccaaggcagcccgaggtcacagggcagagcatcggagagtggagcgctgcacagggagctgggagacatgcggagggtcccctcttcagtcctcagcagggcactgaatggcacatgcgtgggagagaactacttgaagccagggaaagaaccagcagagaggaccaaagggaactgtgccaggcgcgcacacagggctggggacagtgactgaccccagcagaaaggctggaaaattccacaattcatggagcatgtgggtggaatattgagaagggtctcaacagtggagaataaataaccttctactaagaatcttccctccataattgctagaaaaagcagatggaaactaaataagaacacagggccgggtgcggtggctcactcctgtaatcccagcacattgggaggccgaggcgggcggatcacgaggtcaggagatcgagaccatcctggctaacacggtgaaaccccgtctctactaaaaatacaaaaaattagccaggcgtggtggcgggtgcctgtaatcccagcacattgggaggccgaggcaggcagatcatgaggtcaggagatcgagaccatcctggctaacacggtgaaaccccgtctccactaaaaatacaaaaaattagccgagcgtggtggcgggcgcctgtagtcccagctactcgggaggctgaggcaggagaatggtgtgaacccgggaggcagagcttgcagtgagccgagatcgcgccactgagttccagcctgggcgacagagcgagactccgtctcaaaaaaaaaaaaaaaaaaaaaaaagaacacagaaggcttgaacaacgctttaaaccagcaggatgtagtcagcgtttagaggtcactccacccaataacagcagaatacacactctcttcaagtgcacagggaacatttaccaacatagaccatattctgggccagaaaaaaagtctcaacagattttaagaggtccaagtcccacagagtatattatctgaccctatggaattcaatcccacatatttggaaactaaatagcatactgctaagtaatccacgggccaaagaataattaaaagagaaacccaaaattatttcaaactaaaagaaaatcaaagctacatctaaatttgtgttttcacaaatttatagcattaaatgtccatgttagaaaagaagttttccaggttggacatggtagctcatgcctataattccagcatttgggaggctgaggagagaggattgcttgagctcaggagttcgagaccagtctgggaaatatagtgagcccttgtctgtactaaaaatcaaaaatattagctgggtgcagtggtgcatgcctgtagtcccagctactcaggaggctgaaggtgggagggtcactggagcctaggttgttgaggctatagtgagccgtgattgtgccactgtactacagcctgggtcacagagcaagaccgcatctggaaaaaaaaaaaaagaaaagaacagcaacaaaaataagttttccaattcatgacctcagttttcaccttaagtaatgagagaaaggagcaaataattaaaaaaaaagaaaaaaagtacatttaaaggatcagagtgaacaatcaatgaaacacagaacaaaaatagagaaaatcagtgacgccaaatctcattctttgagatcaataaaactgataaattcttagctagactcatcaaggggaaaaagggagagaaaagacacaaattactaacatcaggaatgacaacagcataatcatcgtaggttctactaagtgttaaaagaattgagaaggaataatatgagcaatttaatgttgatgcatttaacagcttagattaaatggacaaaatttatgaaaggcacaaactttcaaagcttactcaagaagaaaaagataaccagagtagccctgtatttatttaatacgtaaaatttggctttaaaaaacaaaaacaaaagcaaaaacaaaacttcccacaaagaaacctcctggcccaggcagctttacaggcaaattctaccaaacatgcaaagaagacttaacaccaaatccacactcatgtttgcaggaaattgaagaggaaagaacattcccaactcattctaaaatatgcacagaaatgaaaaaaaaaagtcacatctgaaaaaggaaaagtctaccctacttgattttaaaaaatgtaaacctgcctgggcacggtggcttacgcctgtgatcccaacactgtgggagactgaggtgggcagactgcttgaggccaggagttcaagaccagcctggccaacacagtgaaatctcgcctctaccaaaaatacaaaaatttgtccaggcgccacggctcacgcctgtaagcccagcactttgggatcttggacttctgaccgctagaactgcgagaaattgaatttctattgtttaggtcacgcaatctgtggcactctgttctgtcagccccttgttgactgaggcagccatatctcaagatattttgtttgttaaacttgtggggagggtgctgctggcattggatgggcagcggccagggatgccgctgaatactttatgatgcacaggacggctccacaccaaagaatggtctggccccaaatgctgataatgtcaagattgaggaaccatgagataaataaataaaccagtgaaacaggatagagagtttggaaacagagccgcacataaatggacaactcctggtctctgtaacaaacgctgctggaataactgcgtatctgtgtgcaaaaagtgaacttcaaggtacacatcatgccacagaacactacctccaaacaaatcataggtttacattcaaatttaggagaaagtctttgtggcctcgtattgggcaaacatgtcttagacatgaggccaaaagcacacttcataaaatacaaaaagtgatgagttgaacttcatcacaattaagaaattctgtgtttggagaggcactgttaggagagtgaaaatgcaagccacagatggagagaaaacatttgaaaacatattatctgataaaagacatgtatcagtctttaaggaattcttgaagtctggctgggcaaaatggctcacgcctgtaatcccagcagtttgagaggctgaggcaggaagagcaattgaacccaggtgttcgagaccagcctgggcaacatagcaagaccccgactcattttgttttaaaaaaataaagctaaaaaaagacttcttaaaaatcatgactgggcaagtggctcatgcctgtaatcctagcatttggggaggtctaggcgggtggatcacttgaggtcaggagtttgagaccagcctggccaacatggtgaaaacctatctgtaccaaaaaatacaaaaattagctgggtgcggtggtgcacgcctatattcccagctacttgagaggctgaggtgggtgaatcacttgaacctgggaggcggaggttgcagtgagccaagatcgcaccaccacactccagcctgggcgacagagcaagaccctgtctcaaaaaaaaaaaaaaaaaaaaaaaaaaaaaaccaataagaagaaaacaactaagtatggaaaatgggcaaaatatttattatttattttgttatttattttattaatttttatttcaatagcttttggggtacaagtgatttttttgttacatcgatgaattctatggtggtgaattctgagattttggtgcacgtgtcacctgagtagtgtacatcgtacctaaaagtgtcattttaaaaatctccagccccctctcgccgcccctcttctgagtctctgaagtccgttacatcactctgtatgcctctgtatactcacagcttagctctcacttaaaagtgagaacatacggttttttattttccactcctgtgttacttcacttagaataatggcctccagctccatctaagttgatgcaaaaggcattattttgctccgtttttatggctgagcagtattccatggtgtatctgtgccgcattttctttagccactcgttagtcgatgggcacttaggttggttccagatctttgcaattgtgaactgtgctggaataaacatacccgtgcaagggtctttttcatagaatgacttcttttcctttgggtagatacccaggagtgggattgctggatcgaatggtaggtctacttttagctctgtaaggaatctccacactgttttccatagaggttacactgatttacattaaaaatgggcaaaaggggccgggagcatggcccacacctgcagtcccagtactttggaaggctgaggcaggtggatcacttgaggtcaggagtttgagaccagcctgaccaacacggtgaaaccccatctctgctaaaaaaaaaaaaaaaaaatacaaaaattagctgggcgtggtggcacacgcctgtaatcccagctattcaggaggctgcggcaagagaattgcttgaacctgggaggcggaggttgcagtgagctgagatcatgccattgcagtccagcctgggcaacagagcaagattccatctgaaaaaaaaaaagaaagggcaaaagatttaaacagacacttcatatatatatatatatatatatatatatatatatagcaaataagtgcatgaaaatgtgctccgcataattagtaattaggaaaatgtaaattaaaacccacgaagtaacactatatactccttggaatggcaacagtttccatgtcgagtgctggcaggggtggcagaaatggaactctgtacaccactggtgggagagaaaatggtatggcccctggggaaatcggcgtggcagtttcttataaaattaagcgtacacttagcataagactcagcaatcctactcaaagacatttatccaagtgaaataaaaatctgtgttcacacaaaaacctgcataggaatgtttgtttgtaattgccaaaagccagagaaagcccaaactgcccctcaacttgggataaagtgtggataaaagtggataaactgtggcacatctgtaattgggagtcctacctcgcaaagcaaggggcaaaccatagaggcacacaacacgaacgaatctcaaggcatcagcctacgtgaaagaagccaggcttggaagattccctgttgtatgatcccagaacgtacggcattctggaaaaagcaatattacagaaacaagaaaaagatcactggttgccagggcctgggagtggggaaagaacgtttgaccacaaaatggcaccggggatttgagtggaggtgacacgactgtatggttgctaaaaactcatagagctgtgaatgttaccttatcatcatcattattattattattttgagatggagtctcgctctgtcacacaggctggagtgcagtggcacgatcttggcttactgcaacctccaccttgtttgggttcaagcaattctcctgcctcagccttcctagcagcagggattacaggtgcctgccaccacgcccggctaattttttggtagttttagtacagatggggtttcaccatgttggccaggctggtctcgaactcctgacctcaaatgattggcccacctcggcctcccaaagtgctgggattacagacttgagccaccatgcccggtctattgtttaataggggaaatacgtcccatcccaagtgtgtccctggcccctcctggtccttgccagctggttcttgggagtcttcaggtgtgttgtgtctttctcacctcaccaggtcccatctgtcactgaccaagttaggctggcatttaacctcagttacctggaagtcaggtgaaaagatgaggggcagctttcaaagggcacctgttgtcctgtgtgagaaaggtttcagcagctcgctcaaacgtgacagcagtgttagctctgcctgggaagggccgacctcccgctaagttctgagagtccaggtgggttgcagagtccacatctttggggacacatatccgcatgtttctgtctctgttttcagggcctgacttcacgtccctggtcttccttggctgagcagtccaacctctctgtgactctgggactgtcacaatcaggtcatcagtctgccactcagctgggtctgccttccatggaggggggcaggggcttctttgtgagctggcaccaagccccctggctctgtgcttagtccaggactcttcattggcagccgtccatgtttcattatccttgggctgggctgccgtgcagctcagcggtgccacccaaccctgctgaccttgttggcattgtccccttttgctttgcaaatgcctacgtcatcgtactgccacaggcctctcctccacctagaccttccctgcaaatcatcaccagcaaagattttaacaatgggggctccacctcgtgtcaaggactgtccatgccccacccaacagccagaggggtggttccagtgcctcctgaccagtaggtgggcccgtcccaagtgctcatcccagcacccgccttctcagaacactctcagcactacttgctttcgtcaggggccttctaaggagcaggcccaaagatgggatcaaatgcaggggatttcagcagggaaatgtctacgtggaggaaatggggaggagccataagggctgggggagccatgtccctgctgcaagtgtgaccctgaatgaagggcgaggggaagcagcatgggagaccgccatgctatcaaagaaacattggatgaggcctccggggatccctacgccaacgtctttcatcagaggggtgtcgggtctcccaggagcaagcccgcatagcaccccagtctctggaagcagcccatggctttggcgtaaatgcggtgctggatgcagagtgcacctgccggggcctgggaaagccactgtctgcacggcaaagtcaattcgtatgcaggagagcagaacatcacaacgaatacacagcccacaagtcctctaaggaacccagcaccaacacggaaaaggacataatttttctcaaggacatgtgacacattcacaaaagatttaccgtaaagtcagtattgaaaaatttgaaaagattgaaatcatacggtgagtattctctgcaattatgctacaactccatgaataaaatgtaaatagaacattctgggccgggcactgtggctcacgcctgtaatcccagcactttggttggccaaggcgggcggatcacctgaggtcaggagtttgagaccagcctggccaacatggtgaaaccccgtctctactaaaaatgcaaaattagccagacatggtggcacgcgcctatggtaccagctgcttgggaggctgagggaggagaatcgtttgaacccgggaggcggaggttgcagtgagtggagatcacgtccatgccacttgagcccaggagaccaccctgggcaaaatagaaagattccatctctacaaatataggtacacacacacatatatacgtatacaaaaattaacctggtatagtggtgtacacctatagtcccagctactccagaggctgaggtgggaggacggtttcagcccaggaagttgaggctgcagtgaatcatgatcacacctctgaactccagcctggatggcagagtgagaccctgcctctaaaaaaaaattaaaattaaaaaaatacattaattaaaaaaaatttttttttttgaaatggagtctcactccgtcacccaggctggagtgcagtggcacgatctcagctcactgcaagctccgcctcctgggttcacgtcgttctcctgcctcagcctccctagtagctgggactacaggcgcccgccagcacgcccggctaatttttttttgtatttttagtggagacggggtttcaccgtgttaaccaggatggtctcgatctcctgacctcatgatccaccagcctcggcctcccaaagtgctgagattacaggtgtgagcaaccgcgcctggcccctaattaaaatgttttaacaaaggttcattttaccccttcttgttttttttgtttgtttattttttgttttttttttgagatggagtttcgctcttggtgcccaggcctgagtgcagtggcgccatcttggctcactgcaacctccgcctccgggattcaagtgattctcctgcctcagcctcctgagtagctgggattgcaggtgctcaccaccacgcctggctgattttgtatttttaatagagatagggtttcactttgttggtcaggctggtcttgaactcctgatgtcaggtgatccacccacctcggcctcccaaagtactgggattacaggcgtgagccactgcacccggcctaccccttcttttattctgcattttcttcaccaatttgtcaaccagccaatttgtcaccaacttgccacagttaccttgcactcaaactacacttaaaaataaaattagaaaacatgaaaacatctgaagggaaaaatcgaagctcatcgtcatagcatttttacacagatatatactagatgaaagagctgcagaaaatgctgcctctatggccctcttgtttgctgtttgtgcaccagttaaaacaactgaggttcgctggaatatggtgcatacttcagactgtggaatataatattctctgactaaaaactgttgcgttgagtaaaacaaacaaacaaaaaagtattttttcccagctactcaggaggttgaagcacaagaatcgcttgagcccgggaggtggaggttgcagtgagctaagattgtggccactgcactccagcctggacgacagagtaagaccctgcctcaaaaaaaaaaaaaaaaaaaattaatgaattaagcattcggtgcaagatattggagagagaaggacataaataggatagcaaataaagcaataactattaaaggaattcaaactaaattaaaaccttcctacaaagaaagctccagggtcatgtggcctcaccagctgctgcaccaaatataaaatgcagaggcaaaaaccctgttaagcaactcgaggccaagcaggccaaatcttggcacccaagccccaggggggcggcgggcacaaggaagcctgggagtccagcgcacacttgcttctggaacaaagaggcatgacaaaaatagcagcgtttcaaaacacaaatacacaatgaacattttaggcccagtccaggcacgcgagcctgttttaacattagacaaaatgtccaagaatgtcatttgctgcattaacttccttgaatacacgaaagaaaatcacataaatgatgtagaaacgtcattccataatatttcataggaatttaataaaacggggtcatttctgccagaatgcattgtgtaaaatgcaaaccagctcaaaagcaactggcaaataaagtaatatcagtatgacactagaattattctcctttagacacctttccccccagcatattaatgatgtaaaaggactgaggtaagcattttcacaattaagacaggcgcttctctccacgcgggccatggctggcttggtgtccgcagggactgctgctgcacctgccccgatgagccatctgaagaagctgggggcacacatgaaaaggctgagaagtgctgggcaaggtggctcacacctgtagtcccagcactccggtaggctgaggtgggcggatcacctgaagtcaggagttcaagaccagcctggccaacatggcgaaaccccgtctctactaaaaatacaaaaattaaccaggcgtggtagcgggcgcctgtaatcccagctacgcaggaggttgaggcatgagaatcgcctgaatccgggaggcagaggttgcagagatcgtgccattgcactctagcctgggtgacagagcgagactctgtctccaaaaaaaaaaaaatgcatttcacccatggtgaaaaaaaatcatgaaaatgcctacaatctgaagcacacgtttaaatttgggaaaatctgaagtgagtgcctgtcagggcctctttgttgaaatgagaatcctgagccaggattgaaggctgagaaggggcagttaacaggtgctgggtggacgtgatgacggggactgaactttgctaacgcttgtcatttactccagtcccaaaattacacagctttggaacaaaactgccgcccagatctatttttccatcagctctgttagtttttagtccatgctttcttttgcagaataaaaagtctttcctatttatggcattatagcaaaaatgtaaatattagcatattataaatgatagggaagttctttaagttaatagaggatgtctgcaaatacccagaacaaatatcacacaagtcctacaaacttcaaagatttatctttgagataaggattataaaagaaaagcctgctatcaccacctgttttacattgaaattgaggtcctagaaaatgcagttagtcaagaaaaacacataaaatgtatgtgaattagaaaggaagaaataaaactctaattattcatatgataaggtgccatgattatatatataacaaatccagataaagctacaaaacattattaaaataagaaatgcatttagtaaggatcctggctatatgattactctttaatagtcaatagtatttcttcacattagtaataaaaacttagaaaagaaaatgtttcaaatggtgtgacatttacagtagcataaaaatcaaatatctagaaataaatttaacaaactgtgtaagactacacagagaacaataaagcgtttttttttgggagaaattaaagaaggcttacataaatggaaggttatagcatgcttggagatttggaaaacccttgcctattataaaaatatgtaaagaaaaacttacatattataaaaatgtaaattcattaacggcaaaaaccacagttgtttttgcaccagcctaatatttggggagaatttacgtttttacaatgtgtgagagtttttgtttacatatgtttataatacgtaagggttttccaaatctccaagcatgctatatggcatacttttaatggcaaaaaccgcaattaattttgcaccaacaaaaatatatctatagatttaatcaaaattccgataggcttaaaaaaatttggataaactggctctaaaattaagtgaaaatctaaagtaaaataatcgagaaattcttggagagtgacaatatgaggggtggagtggacatgtgggcttattctcaagctacggtaagtaagatgatctggcatcggtacagcaacagacagaagagcaaatagagagccgagcactagaccctgcatccaggaacacttgaggtccagctaaggtgtctcagcagaacaatgaagaaaggacgggttttcaaaacagcagagaggcggaactcacctctgcctgtctccatgcgcagggagattatccatctaaatgtgaaaaacaacataataaagaccctagaagatcatcaagggtgatatcttttattttattattattatttttttgagatggagtcttgctcttgtcacccaggctggagtgcagtggcatcatctcagctcactgcaacctccacctccgggttcaagtgattctcgtgcttcagcctcccgagtagctgggataacaggcgcacgccaccacccccggctaattttgtatttttagtagagatggggtttcaccatcttggccaggctggtctcgaactcttgacctcaggtgatccacccaccttggtttcccaaagtgctgggattacaggtgtgaaccaccgcacctggccggtgatctcctttatatctggttaaatcaagaactggtaataaagaaaaggacaaccactgaagacccctgcttcgttgagatgtcgtgtatcactttaggaaacaacgctacgaccactagaaaaaatgcagatgacaagtacacacaggacattcaagagccataaaagcaaagaagactagagcaactcaacttccaaagaataaccttttctagatagttgctctaaatggctgattttctcctgggggcccatcttgggagagggctgagggttgggtttggcctgggtgttgggattctgctaggggaagagaagccagtggagacattgctgagtctcgtggggctggaagggagtggcgggaggcgcagggcagagccggttgtggccgctggacacttgtccaggtctagggtggtccgcagagcggggatgttgggttggtaactgttaagaggctgagtgggccagacgcggtggctcaagcctgtaatcccagcactttgggaggccgaggcgggcagatcacgaggtcagtaaatcgagaccatcctggctagcacggtgaaacccgtctctactaaaagtacaaaaaattagccgggcgtggtggcaggtgcctgtagtcccagctactcgggaggctgagggaggagaatggcgtgaacccaggaggcagagcttgcagtgagccgagatggggtttcaccatgttggccaggttggtctcaaactcctgacatcaggtgatccacccaccttggcctcccaaagtgctgggagtacaggcttgagccagcgcacctggtttaaccagatttaaaagatatcaccggccaggtgcgctggctcaggcctgtaattccagctctgggcgacagagcaagactccgtctcaaaaaaaaaaaaaaaaaaaaaagaggctgagtgaactcctctcttgcggccccatgattcgtgagtccctctggagacagtggcttgcccccagtgctcgaggcccccaggattcccacccagatctccagccagagcgaagagcaaagagcaaaacctctgccgggaagacggaatctgcatcctctttcacggcttaggagaaacatttaagggctcaggagggttctgccccaaatcggtaacaaactaaaagcgactgactcagaaaatctcaaatccaatcctgagcaaacgcagtcaaacgaattcctcaaacaaactgggttgaaaccgtcaagccctcccatgcgatccacctagcaggagaaaatcttcttcacgagaaaacaacaatttgtctttaataaattaatacataatgtttagcctctgaagttcttttatgcataatgtatgaaatgcaaaaataaatagagacatgaaaagaagataaatacatccaatatcaagaaaataaacttagcaggatggttacctgttgtaaagaacgaaaaaagaaaagaaagccagacagtaagaggcaaccacttataatctgtatgttggagttatgcattaaaagaactattatacatatgttttgaagatagaggaaaagatgaacaaaatgcatgagaaggtgaagaatctcatcagaaaattggaatctaaaaaacaatggtataagcattgttaaactaacattatatctaaaatttgaaaatgcattggatgaaaaaacagaatatagctgtgctatgcccacatatactttctgagagtagatcctgagatatttacacaagttatatcctaaggtagtatttcttaaagtgtttggcaataatcaagatataattaaattttgcttaaaatacacaatgtatagaaaatgttggattaagcaacactcaatagatttccaagcaacatgtcttttgtgagttttattttacctagctaatatgcattatgaatcttcagagaagggttcttaacatattcttttgttttccttcacacaagccaagagtcctaatcaagattttctgcaatcaactatgattcttctaaaaacatgttgggtatattcaatcatatgctgaacagagcagaagactgaattagcaaatttaaagaaagatgaatagaaaatatacaaatcaaagacagtctttcaagggacaatcggtcagcgtaactgactgattttatgagttagttgatttctcattagaaacaatggaagccgtaagagaacgggatgacagtgtggtggtggtgtttttttaaaagaaaaaaatggccaacctagaattctataggcaacaaaaatatccttcaaaaataaaagcaaagaccatttcagaccagccaggctgttgcaggaaacactcaagggagatttttgtgctgaaaaaaaattgtcccagatagaatgcggaacttcaaaacagaatacagtgtcctggaaaggctgagtaagtatgcaagtcactacatggaaaaagagaaagagaaagagagagagagagagagagagactgcgtatttaaaacaaagagattacagatgtttataacatatatagaggtaaaatataaaatgacaatagcacaaagggcaggaggaggtagacatggttaaattcctgtaaaatgtctgtactgtttctgggaagtggtaaaagcacaactttctttagaccgtaacaagccagtaactcctgttgtcatattatcactcctaagagattaatacaaaagtatatagctaaagatctaatggagataaaatgaaataaaaacatttgatttggccgggcgcggtggctcatgtctgtgatcccagcactttgggaggccaaggtggatggatcactaggtcaggagatcgagaccagcctggccagcatggtgaaaccccatctctactgaaagtacaaaaaattagctgggcgtagtggcactcgcctgtagtcccagctgcttgggagactgaggcaggagaattgcttgaacccggcaggtagaggtttcagtgagctgagatcccgccactgcagttcagcctgggcaacagaaagactccctctcaaacaaacaaacaaacaaaaatttgattcatctaacaaaaggcagaaaagaaataaggaggaaaaacaagtgagtcgaggaaaacattgcaaaacaaaggtagatttaaatgtaactatatcataattattttcaatgttacaataagtggataatcactgcagataaaagtcaaattagtcaatacaactttaaaaaaaacaaatgttgtttacagcagggcacagcggctcacgcctgtaatcccaacactttgggaagctgagatgggtggagcgcttgaagctcagaagttcgagaccagcctaggcgacattgcaagaccccatctgtaccccaaaaaaaaaaaaaaaaaaattagccaggcttggtggcatgtgcctgtgttcccagctactcaggaggctgaggtgggaggatcgctgaagctcgggaagtcgaggctacagtgagccatgattgtgccactgcactccagcctgggtgacagagcaagacccagtctcaaaaataaataaatacagcctggccaacatggctaaaccccatctctactagaaatacaaaaactagctgggcgtggtggcacacgcctgtgatcccagctactcgggaggctgaggcaggggaatcgcttgaacctgagaggcggaggttgcagtgagccgagatggcaccactgcactccagcctgggtgacagagcaagattccatctaaataaatacataaatagttttttataaaagatataattaaaggatatgcacagattggaatcgaaatatgatatagcttacaaacattacccaaaagaaagcagaggtagttaaataaacatcagaaaggaagtagacttaataaaagaaatattgctaccaataaaatgaatcacttgataatttcaaaaagatcaatcaaaaagacacgacaattctaaacttccattcatctgatagcgttgcttaaaatacgcaaaagcaaagcttgacagtggcaaggagacatagacaaatctacaatcagagttggaggccgtaatgcacgtctctcagcaactgataggacaattagactgaaaatgaaatcagtaaggcaggagaagatttcaacaacataattaaccactggaaataattaaaatttacagccaataactggaaaataaacatcttttcaagtgcacatagacacagttacaggaacagaccaaaatctgcttcaaaaagaagcctcatgcattgttaaagtattgaaatgatctagggaatgttccctgacaatagtaaaaataaagccagatactgagaacagaaggataactacaggccgggcgtggtggctcacgcctttaatcccagcactttgggaggccgaggcgggcagatgacctgaggccaggagtttgagaccagcctggccaacatggtctctactaaaaatgcaaaaaattagctgggcgtagtggtgggtgcctgtagtcctacctactcgggacgctgaggcaggagaatcgcttgaacctggaaggcggaagtcgcagtgagctgagattgcgccactgcactccagtgggggcgagtgtagagcgaaactctgtctcaaagaaaaaaacaataataatcactataaaaatctgaatgtctgccgggcacggtggctcacgtctgtaatcccagcactttgggaggccgaggtgggcagatcacgagatcaggagatcgagaccatcctggctaacacggtgaaaccccgtctctactaaaaatacaaaacaattagccgggcgaggtgacaggcgcctgtagtcccagctactcgggaggctgaggcaggagaatggtgtgaacccgggaggcggagcttgcagtgagccgagatggtggtgccactgcactccagcctgggtgacagagcgaggctccgtctcagaaaaaaaaaaatctgaatgtctgcaaattaaccaagtgtctatgtaatcaaggattcaaaaaagaaatcaggatagaactcagaaactatattgaaacaaatgataataaaacatatataatatcaaaacttgtaggatatttatggatttaaattaattcattatattatgaaaaaagaaagttaaaaagaattattcaccaaagaggctggagggaaaaacagcaatttaaacccaaagaaattacaagaaagggaataataaagttaggaacaaaaattaatgaaatgaaaagcagacacacaatggaaagacccacaggcaaacttttcttttttaaataagtatattgataattatctacaagactgaccaagaataaagagaatcaaaagttgtcaagagtatgaaataggatgatcagaaatgaaaatgtgggtacagacatccaaaatggaataaaaatatactatgaacaactttatgtcaatacatctggcagcttcaatgaaatggaaaaattccttgaaaaacattaccagttatgaagacttaatacagatagtattcccacaggaatggagacagtctgatgctgctgtaaagtcagataaatagaccagtgggacagactgaagtccagaaacacatgcaccacgtctctacggccacccaacaaaccactgagggcccctgcaacttagtgggggaaagatggtcttctccatgagggacatggcagcactgggacgtctctatgggaagaataaaaatactaacattgccccggagttggttcaggttctccggcagcagaaccagaagtgagaagatctccatgtctgtaatttactggggacatgctcctaggaaaatgggggaagggaagtaagatttcaggagagtgggggtttctgtgcaggcccagcttctgcctaatcaatggcaactcttgatcatagatcataagtttatcttgatgcagacaggggagcttggctttggggctccagccggaaacagcagtgactaaagactgtgaaagggatatgaagtccagatacagggtcttcccaagtaccatctcagtcgtggactcttggagacagatgcacactgaggctgggggtggggcacagaggaacagtggtatgacccaagcagacctgggtggaggacctacagtgtcctcagctcccccgacctcccacctcacatcatacacaaaaattcatccaaggtggagcacagacctagatccaaaaggcagaacaataaagctattaagagaaaagcttcatgaccctgaagtgagtaaaaaaaaaataaagaaaaaagaaattaaaaattaacaggacatgaaaaacatcagtcatacaagataaaaattataaatggaatttaataaaaaataacttagttatcagaatataacattaagacagtgaaaagacaaactgcagagtgagagtgtgcctaattacatttgtctggaatggttcctcaatctttccttgacgttcatgacctcgacacttctgattataggccagatctattctcacgatccctcagtttgggtctgcctggtgtttggctgtgcgtttttggcaggatattagtcacctcaggctgccacagctaatatgactgggtggctgaaacaaaaaaaattattctttctcatttctggaggctggaagtacaagaccaagatcaaggtgctggcagatttgggtcctagtgagggctctcttcctggcttgcaaacggccgccttgtcactgtgtcttcacaggctgtgggagagagagaacaagccctctggtgtcttttctcataaggacactaacctcatcatgggggtcccatcctcacgacctcatctaaccctgatcagctcccagaggccctgccgtcaataccatcacagtggaggtgacacaaacattcagtccttaaccggcagaaatatcacagaaacgactccgttcttatcagtgcatcccatcaggtggtgaacagtttcaatttatctggttgttgatgacattcactttgatcatttgatcaaggtgatgcctgctgggcttccccacctgtaaagttacctctgaaggcataaagtcataaagtttctttgtgattgcgatgactctttaggaaatttctttggaactaaagatcactgtggttgttcaactaccagtttattgatgtattaacatcagtgtattaaactcgggttcctattttatgcaataaactgtaatcttgactaacattattggctttgatgctcaagttgtctctggcgtggccggtgggaagcgactcctgcgtgttttctgcatgtcctcgccctggctcatcctgcccctgacctgtctcagcctggaatcagctgcttccccagggagccccgggtcctgtcggtggtgagtggtatttaggggccagggtctgccactggggggttgctgctttcagagcctcttagaggaaggagctggagaataaatggattcctccaactccaatccaacaccacaggctgcgttctagtttcatccctttcaatatttgtcactctctttgcccacagtgagaaagcagactcccatttacttcaatatctttacttcttctaccgaccccctgggtgtaatcacctccctcccattgccactgcccatctccccgcagatgcccttctcatcaggcatggctctggccccctccttgcagcccctcctctccgtgcccagcctcctgcccccctcctcgagtgccttccccacagggatgcccccacattctcctctctgtgcagcttagttcacaataaaaattactaatcaccactgctcactttccattcccagagccacttttcttctggagatattctttctatgcattggaattacttatgaataaatataaggctaatttctctcagagatattacttgaacccaaagatgttcatagttatttattttattttcatatgcatatgaaaatatgtcagtagacatttgagttatttcccattgatggcatttatacataacactgcaatatataaaagacataaatattatacagaaaactacatcaagcataaatgtacaacttaatgacttttataaagcaaatagtcatgcaaccaccaccagcatcagaaaacggaaccttcccagcaacccagaagttgccccacctgtgctcagatttgtcaaatgcatcaacgtttttcattatgatcactctatttgtgtcttgccgagaaaagcagtaaccaaatggaagatgttggtaattgtgactatattaaaattggaaacttctgtctataaaaagatgccactaggagagcgaagaggaaagcctccgagcggaagaaattatctgcactgcgtagaaccatcagaggacgtggacacgctgtcctgagagaacccctagaatcacggagaaactgacagcctggtaggaaagaaatggtcaagacactgaaatagtcatttcacaaacaggaaaaccaaatggccagtctgtgcgcagaaaagacgctcgacttcctcacccatctgggaaacacaaaccaaacccaccacgagatactaccacatgttcccctgagtggcaaaaattaaaaaaaaaaaaaaaaaaaaaagactgacagcaggtgcactggggaggaaatgaaacggtgggaacacacactgctgggggaggcgcagccatcttggagggcgggcgtcgcctgctgaggtggaggatcagcagacttcataattcggcaatcccactactaaggatctgcccgagagacatgggttctgggggccccgagcagcacacacaaggatgcttgcagcagtggtacccctaaatgccaagacggaaaccgcccaagcgtttgtcggtggtaaaatggatatgtacgctgtggtacatgatgcaatggatgtcagtctgcaatgaaaattcataggcaccccagtgaatcgccgggggtgactcagcgcaaaacaccaagcacaaaagagtgcatggcccggttccattcataaaaagttccaaaagtcaggagcctgtttaacagatgacggcgctgagggatgcactcttaggtcgtaaaaatgtacacaaggacttggaattgattgctgggtgttgatcagtcagggtggtgggtcccagctgggaacgaaggggtggtcagaaggagcccccgggggcttccaggggtctggacaaagtgctctttcttgatattgtatggttaaattgatgggtgattgctttgtgaagattcatcaagctgtacattttcaaaaattttacttttaattgactttgggcactattctgtgcgttatatttcacatttaagaagtttttgtttaaagaaatcctttctttcccataggtcatgaacagcccattaattttggctaaaagtcatcgttgctgctttgaaaataatcggttttctctggctgcttttaaggcattttcctctgtgtctctggtgctgtgcagttccactgtgatgtactcagccggggatttactgttctatcgtgtgggcttcactggtctcaaattggtgggttgatggagcttatcagctgtgggccattttcagatgctgtttccagtgactacttctgcttcttccaccatcacagcctctctggccagtctcccaagagcacatctcccgtcctggctgcgagcggccccgaccacccctgcaaagcctccagctcagcaggtggatgtgaagtcggggtggggaggagattcctgtcccttttctgtctcagaacagttcccctctccgcccagtccctgtcaaggacagttcctctcatcctgaggttcagtgggccctgtggttttgtggggtcagagacttccctggccccttgtgcccccatccatctgagctagtcagctgcatgctatgggaggaggaccccagggagcgtatattgctggtctctaaagcccccgtgggacagctgagcacatgcaattaggaaagaatgttatgcggatttccagtgtctggagaagaggcatcaagctccaccacctgcaggaatgggcagtggcttggcaagggcaggggagcctggagagctctggaccactgtggtcaggggaagggaggctgggggatgaccctatagcacctcctccccaatgcacacacatcttacacatgcacacacacacaatacacacatgcagacatacacaacacacacatgcacacagccacacgcagcacatatacacaatacacacatgcacagtcacatacatgcacacatgtacacaaaacacacacatgtgaagacacacacatgcacatatacataatacacacatgcacacagtcacacacacatgcacacagccacacacagcatatacacaatacacacatgcacacacatcttacacatgcacacagccacacacagcacacatacacaatacacacatgcacacagccacacacagcacacacacacaatacacacatgcagacatacacaacacacacatgcacacagccacacgcagcacatatacacaatacacacgcacacacatcttacacatgcacacagccacacacagcacatatacacaatacacacatgaacagtcacatacatgcacacatgtacacacaacacacacatgtgcagtcacacacatgcacatatacataatacacacatgcacacagtcacacacacatgcacacagccacacacagcacatatacacttatgcacggccacacacgtacacacaacacacacacacatacatagtcacacacatgcacacagtcacaaacatgcacatacaacacatccacatgcatgcatacacatgtacacacaacacatccacatgcatgcatacacatgtatacacaacacatccacatgcatgcagtcacacacactcacacaaagcacatttacacacatgcacacagtcatacatgcacacccttgtacacacaacacacacacatgcacacaggcacacacacatgcacacataacgtgaatatcacgtgcagtcacacacatgcaaacacacacacagttacatacattcaaacacatgtgcacataatacatgcatgcatagagtcacacacacatgcagtcacacacaacacatacatgcacacagtcacacagaagcagtcacacacacatgcaccacatacacagacaaaagcacacaggcacacacactacacacacacacgaacacatatgcacacagtctcacacacacacacacacacacacagatgcacagtgaggctcagcctttacagtcccctcagtcttgatcctttatttatttatttattgagacagggtctcactctgtcacccaggctggagtgcagtggtgcaatcacggctcactgcagccttgagctcctgggcacaagcaatcctcctgcctcagtctcccaaagcactgggattataagcatgagccactgagccaagccccaatccttttaaactggcctgttgggctggggtcccaagggcagtgaccagggcagcatggggagaggggagggtagggaaagtcacctgactccccaaagatgcacaaatatatggaggcacacagggagaaggacagagagagtgagagggggattgattctttcgttcgtacaatgtttattgaatgtcaaatgtctgccaggcactgtgcaaaatcacataaaaatgaggtgggaggagtgcagtggacagggagcgccagcaggtcaggcatgagtacagacaggcaaagacacagacttcgaagccagagaccagcgccggagctgatgcctgcttgcctgcctgctgagggcgagaatgcacctgctgtgggggcctgacctcaccgtggacacccaccgcgggagcaccagccctcccccggtccccagggtatggaagccaggggcctttgtagccccacattgcccggagttggatacaaacatcccaagagctaggggtgcctttactggctggaaggtgaccgttccatttccccaacatgaactcagaaagcttcagccaggcgcaggaacatcccagggaaaagctggctgagggcttccctaatgcaggggtgtttcctcctggcccctgtcccaggcagccaccagcactgccaccaaatgtttaaggaaaataggcaaagaaagcatttgcccctctactttcttccctcccaggcataacatggaagacacctggacactggggttggccttagctgccccaggaactagaagccaggaccctctctcttccaaggcccagcagcctctgccatcctcttccagcccaggcttgtccaggaagcctctgggtctaatggtgcaagcatccgaagtgcccacaaccaggctgcccacagtctcggcaaggctttcagccgcccctggcacttctcccaccatcctccaagaggctcaatgacagctccgtgcagccccgcatcagcctcgcagcccgccgcctcctgccctcccatcccaccactgcctgggttcaagggtcagtgctcaagagtcccacatggtccccaccctgtcccctctctcgactctgacccccaagccctcccattttgaggtcacacactcccctcccctcttccctgagcaccccctccatccacctctgcctgggctgcaccccaggcccacgggcaggtgctggccaccctcccttcctctgcaggtttctgggtcaggactgtgaccagaatcttgctcgctgcactcctgccacggctgtgccctgtcccctgcgtttgtcccatctgctgctagctcaaggtcctcccttctgaggcaccccacgtctccagcccagaaggctcttcccttctctgcttggtatcttaaagtcaacatcttcttctccctggtttcctgcccttggtacacagccctctccactgggctgtccaagtcaagggacaggaatcctccgggcttctcccccaccttaccttccaaaccagtcaaccccactgactgcacagctgccacgcaggcgccctgctgtccagccctctgctgccagccccagcccaggctcagctccctccacttgcatccacctctgtccactggactcccctccaagctggcctcgctaccccagagggcacgagcttcccaaaacatgaggcgcacggccatgccccttccctgggaaggtttgcctgccttcccacggaatagcaagtccttcccactgcgcacctgagctgcgggatttcctgcggtttcccagaccagctgggcacccacagcgcgaagctccacacccatggccactgcctcggcttcttctccatcttcacctccccacctccttcgtgtgcctcgccgatgccctgcacttttcctagtgcaccctcatcagcttgtcttcagggctgaccggcacccccatgactgtgcctgagttccaaggggacagagcccatccctgcatcctgcctcccacattgtggactgcacatgccatgggccgtcagggcgctggcctcggcctttgaaaggcatcttccgttcattttcacagtgattatagaagtgaaaggccattttcctattttacagctaaggagatgggcacgagagaggtaaaggggcctgtccaggtcccagagccctccaggagggacaggggttagccaggcgtctatcgtctctgcctgctgcttccttccgagtgaatttgtggtttcctttgctctgatttggccaatgcaggcagctgaggctgtgccccacccccttccgtccccccaggaggctgcctgaccctctaagtgactcgagtttggggtacctccaccaaatgcccccccttcccattcactgtctggcacagctgtgatggagcagaccgtcccctgcagtctgttgggacacagcacccggggccctgaccgccaggcagttcctgagggaggattgcaaagcctccagacttctccaggccctgccagggacacaaagtagaaggctgggctggagctgcatgggtatttcattgaaagttcacagacacaagggctctgagcggggtcacatcgtggaggaggcagggtcggggagcacagagtgagtcctcccaacctgggacaattttgcataagcccttcctgctaggtgtcaggtccaaggggccccaggagcctgggaaggggcacgtgagggcagggacacagacgctggaagccagggtgcagcagcgaggggagaagcccccaggccccagacacaggcagggtggaggccaggaggcggagggggtggactgagggccaagctcactgcccccttgctgtactcagcttctgatggccttgctgcccagttcacagctcaagggggccccaggacaagaagccctgccctgccccaacctcatgggatcctgcgtttcagggaccatgagaataaacatgtctcagtgcttgtctccgccagcagccgtgcctggcgggccttagtagtcggtgagggggtaccgcaggaagatgaagacgaggatgatgcaggaggctgccagggcagaactggtgatgttgaacagccgggccgtctttgcatcctccacggctccattcaggtcattgagaagcttcttgtctcgcacctgaagccgggaggaggacaggaaatgggcagtcagccagggagcagggccttggagcatccaggagcccagcagagccggtgccacagtgctcagcacagtaccagtgctttgtttccgagagctgacgaatgaacgatggttctagaggaacatgtctctgccctggggcactgtacacggatgaacttggggcacgggggcgtcatgtctgaaacctctcagccctcaactggtttataaagtaggtgagatgtatttatatatatagagaaaagcaaatatggtaaaatgttaaaaaattggggcaactgggtgaaggatataaagaaattccttgttttttctttttgcaagttttaaatgattaaaataaaagaagttggcctcagagaggatataattggaggatggggcgacacaactgtctcctaatttgattggttctgcctcgtttaaaattaactgggatgccttgaggatgagcgttgtgcattggcaggagagacagcagtccacagggcctttggggaggaatattaaggcgaaaggagtgggctggcactcaggaagtcttggggaggcagtggactgagctggactcatttccaagaggcaaccttcattcagaatgaattatagggccctcccctcctcagcactctttccttctatcacatccacaaatatgtgcgtgtttgctgtaagaagaaaccaagttctaggatgaggaagggaaggagaatggaaagagaggaagacaggaaggggcaaaaagtctttgccttagtagattggagctgggctgaaagaaggaaggtgggcagatagatactggggctgactaatgcctggatccctcagtgtgcaggttaggcagatggacaggagacctaggtcggaagactggatggacagaggatagatgtgtggtcagggtgatggatgtgtaattgagtgggagaatggaagcataaatggattggcctgtgggtggatggatggaggaggcagaatactggaaagaacaaagggagaggagagaaaaaagaagatagagggagtggggaagggaaagctagaacgcaattcagtggagtggaatggaatggaatgaagtggagcaaatgcagtgaagtgaaatagagtggagtggatggagtggagtggatggaatggatggagtgaatgcagtgaagtggatggaatggatggagtgaagtgggtggaatggatggagtgaagtgggtggaatggatggagtgcagtgggtggaatggatggagtggagtgggtggaatggatggagtggagtggatggaatggatggagtggagtcaatggaatggatagagtggatggagtggagtgaatggaacggatagagtggatggatggaatggatggagtggagtcaatggagtggagctggaaaaaagttggagagggaagggaagggagggaacaagggcaaatgggcaagtaggtgacttggaagataaattgtacagaacgtgctatcaaaatggagagattgaagatgggaagaagcaggtattgaggattcagggtaaggaaggaggcaggaagaaagtctatgctcttatcgggttcttatgctagtggttttggaggaaactgacatctgcaatgaaatttgtattcctttataaggactgaatgtgtcacccacttattgaggtcttatttgatgcctttgctaaaataaagttgtataactttctccagaaagagctattacatcttttgttagacttagtcttagtctatttattgtttttattataatgtaaaagtatattttaaaattgcatgtctaactgattttgtatccagctaaactatcatattgtactaactgaccacgtgttcttaataataaatcatatctacagcaaatactagtatttctatttcctccttgcagtctactcctagacagcacagcatagaggttaaagcacagatgcagaaacactgactggatttcaatcctgattctgcgggtcgtagactgtacagccttaggccagctaacaacttactcttctgctcctcatttcctcatctgtaacatgaagatgacgacagcgctgcctcccagggttgtgggaaaggcttaatgaattgatggatgtgaaactccaccacagtgcctgggccaaagtaagctcctctcatggaggcaaagaagattccagagcgtttccagacagcagcaatgaggacaagcagctgagtctcattcttgacctcaaggtaccaggaaggataatgctcatcttatcattagaggtctatgattgcgttagaatttccacaagataaactattgtttccttctctaattcattaatatggtagattatatttattgattttcttatatcaagacaactctgaattcctaaaaaaacttttggtcttgatttctttgttggatacttggagtgaggaataacgtggcagagggaggatgaaacactgggtgtcaaaagcggatggagcggagggcaggaggctgaggcagctggggtattgggtgcatagaaaatggcggccacagctaaagaagatagggaagaggagggtgggggagtgatctaatgatcgggaaggtgggtggatgaagctgaggggttatacggatggagactgggtgtatgggacagagaaatggatgtagaaacttgtgctgggtggggaggagggctggacggatataaaatgtacgttggatgagtgggacagggagagagctgaatttatgaatacaatgcttcttgatgtacaatggggctacagtccaacaaacccatcataagtttaaagtgtcataaggtaaaagtttcatacgcattttcgtatgatgtgtttttcacaagcctggtaagctgaggagtgtactgggtgcctatggctttcctgccattgtgaagttgaaaaagcatacgtcgaaccgtcataagatggggaccgtctgtatatgctgggtggggtaacaggtgcatagacgaacatatgaatatatgtccaagtggacagatggatatgcaagtgtatgccacatgggtggggcatctgggtaagcgggtaagtgaacggctgctggatgggaggtgatgtgtggatatgtaagagcatgttcggtgggcaggacaggcaaataggtgaatacacgagaatgtgtgctcatgtgtccatgatggcttggaccagggcagcggcagagaaggtgatgagacagagccaacttctggacatgtgttgaaggtggagctgacagtgtttgctgggatcaggcttgcagtgtgataaaaagaatggaggccaggcatggtggctcacgcctgtaatcccagcactttgggaggccgaggcgggtggatcatgaggtcaggagttcaagaccagcctggccaagatggtgaaaccccgtctctactaaaaatacaaaaaaattagcaggggcaggcacctgtaattccagctacttgggaggctgaggcaggagaatcgcttgaactcggagggcagaggttgcagtgagctgagatcgtgccactgcactccagcctgggtgacagagtgagactccgtctcaaaaaaaaaaaaaaaaaaaaaaaaaaaagaatggaactccacgtggtttgaatgaatggacaggtggttacaggaatataggaacggatgccagactggaagggcaggtgcacagatgggtttctgaatgcacgctggatggctggagcaggtccatggctggatatagtaacggatgctggatggctgggacagatccatatgctgaatgggtggaacaggtagatcaatgaatttatgatgtgttttggatggctaagattggtggataagagaaaggaaggagggttgttggtgtagtgtagaccactggatggtagatgggtagacagattccttaatcaatcaatcatcaatcaatatttacttagtgtctgctctgagtagttgctgttctaggtcctgcgtatatcacaaggaataaaacagagtctctgtcctcacgcagcttacattgtagggagaagatacagaaaataaacacgataaataagtcaaatatgtaatgtgctcagtgtgctaaaaagaaacctgaagaggctcaggggaacagagagtgctgtgggaggtgcaagtctagcttggtggccaggctcaggggaacagagagtgctgtaggaggtgcaagtctagctcggtggccagggaagaccttgtggggtgggaggtatttgaggaaagatcggaagaatgtgacagactcggccatgtgttcatctgcagggaggcatgtcctgggagcatagagctgtctgtgcagggcccggtgcttctgaggactaggtgcagagtaggggcagcagatcacagagagagaaggggaggacatacggtcagaggagaccatccaggagcacggtgcaggctctgtgggtgctttttagtcatttagagccggaaagatgaacgtgatatgacatatgtgaacgaggcagtgctggccgctgtgtaagaacagatggcaggggccaggcatggtggctcacgcctgtaatcccagcactttgggaggccaaggcaggcagatcatgaggtcagaagtttgagatcagcctgaccaacatggtgaaaccctgtctctactaaaaatacaaaaattatccaggtgtggtagtgtgtacctgtaatcccagctactcaagaggctgaggcaggagaatcgcttgaactcaggaggcgtaggttgcagtgagccaacattgtgccactgcactccagcctgggcaacagagcaagactccatctcaaaaaaaaaaaaaaaaaaaaaaaaagaacagatagttgaacaggcagagagaggtggattgaatggtccaggggagggtgagggtggcttggaccagggcagcagtggtgaaggtagtgagacctgaccagctcctggacaggcgtggaaggtgaagctgatggtgtttgctgggatcaggtgtagaatgtgataaaaagcatggaacttgacatgatctcaaggtttttggggtttgatcaactgaacagggagttgtagaaggctgcaaaaggaagactcgtttagcagttcaatttctgacatgtcaaggtaggaatgccctttagatatatagcagatatttggcatagcaatttgtgtgagtctggagttcagagatgaggtctagggcagagatataaatttgagaagcatcggcaaaaagatggtatttaaaactgatatagtttgaacacatgtccctgccaaatctatgttgcagcgatccccagtggtggagagggcctggtgggaggtgtttggctcatgcgtgtagatctcatggcttgatgctgtcctcaccatagtgagtgaattcctgagagctggttgctttaaagtgtgaggtgcctcccccttatccctcccttgtgaggtgcctcccctttatctctcccttgctcccactcttgccatgtgagatgcctgctcccactttgccctccaccatgactggaagcctcctgaggcttccccagaagcagataccagcaccatgctgcctgtacagcctgccgaaccatgagccaattaaacctcttttcttataaattactctctctcaggtatttctttacagctgtgcaagaacggcctaatactaaaaccatgggactggatggggcaccaagggagtgaacatgaaggaaggagaggatggagagctgagccctggagccctgcagtgtcagaaggttagggagtcaaaagcaattaggaaacgggcccgagaagagtgggccaagaagcagggaaggcaaaggggcaccagggtgctaggtggcggaatgggctgaaaagtacaagcagaggtgggacatagaggatgaggcagccatgtgggggcaggggagatggatggtgctgggtgggtagaggagagggaggaggagagcgggagagagaacaggctgatggctgggagttgggtgagtccatcgaagcaagcaaggaaggaaaatggaaggacattctgatgatgaattgagggctaggtggccaggcagttcttctatgactgtgaatattgatggatgacagatgggtgaatgtgtgaaggaaaaagagcaggggtgggcagatgtgggtacagagaggaactggctctggctatagagatggatggaacaggtcactggaggaacaggggagaggaaacacaaggaagggatgacatataagtggatgaaagggcaatgttatggtttgactgttcatgtcccccaaattcctgtatggaaatcctaacccctaaagtgatggtaggaggtggggctcttgagaggattaggtcatgcgtgggattggcacccttataaaaggggccccagggaggccctcggccctactggcaaatgaggacacagaagttgacagcctgcaacccagaagagggtcctgatcagaacctgactatgctggcaccctgatctcagacttcgagcctccggaacagtgagaagtaaatacccagtgtttataaaccaactaatctatgataattcattagagcaggctggacaggctcatgccactcaacttggaggcaggtgaatgggatacctgaataaagccaaggaaggaaagatgggatggatgtgcctggaaggtcagatggtcaacgagatgagtggtggggtgggtggacacatgcctgagaggaaacaagagagaatggacattttacagctgaatgattagctatattagtaaagcacgtaggcggatggtagaaagaatgaaggggatagaaggggagaatgcatggccgaaaagtggggcaaaagaaaggaaaagaaaaaaatgagagggaaaagaagaacgtgagaaatttatgcatgagcggttagagacaaggtggatgaggaaggagggaatagagaaagtgacagtggctggattgagctgacagttggggtgagctgaggcacgctgagtatgaaggaggcactcagtgaatgggtgagtgtgactcagctaggggagcagcaggaggaagggcgggtggatgtcttgaagggtgaatagatgtgttgccacatgaggtcacaggatggagggatgattgggtctattgacaggtagggcttggaaggaaagtgggcaattactgagaaagtgagactagatgaatagtttagtgggttgatgcataaggttggtggggacaggatgggagagcagggcagggaggggagcctgaatgatcatgtgtgaacacaggtggatggaaggttgggtggctatttggaggggttgaaggaaatgtgggaggatggattgaatataagtttgggtggatggacggagggaggatgaacagatgatggatggatggatggacagatggaggatggatagatggatggaggatggatggatagatggatggaggatggacagatggaggatggatggatggatggacatatggatggatgaaagataaatggatggatggattgagggtggatggatggatggatgaaggatggatggagggcggatggatggatggatggaggatggatggaggatggatggatagatggatggaggatgaatagatggatggatatggatggatggacagatggaggatggatggatggacagatgaagaatggacaaatggaagatggatggatggacagatgaagaatggacaaatggaagatggatggatggaggatgaatagatgaatggatatggatggatggacagatggaggatggatggatggacagatgaagaatggacaaacggaagatggatggatggatggatggatggaggatggacagatggaggatggatggatgaatggatggaagatggatagacggatggatggagggtggatggatagatgaaggacagatggaggatggctgaatggaggatggatggatggatgcatatggatggatggacagatggagaatggatggatggaagatggatgaatgatagatggatggaggatgggaaagataaatgtgtgatgctgatattcagaaaggagtgagtgggtgagtgtgtacatccaaaacccaacgcagaacccacccacctaacctgttctttctgaccgccctgtcactggaaggtctcacagcctcctgggctcacatctagcagctgctgtgtcctagccacacctgttcctcctctcccacccccatccccagctcgcaagctctcccacctggaccaccacactgggacttgaaccttctgcctcgaggcttgtcttgtctccttcccctacactggttgcagatttcatggccctgatcatatccttctctttccatggctcctacagatgagagcccagcccctcacgaggttttcaaacccgttcaccgcactgcctcaggcactcttccaggaatgtcttccatctcccattgaggacaggggccttgccgaccccctagactgccccacctacgtgtcttagtttatgccattttccccgcctgaaacacctttcccctcaccaagcttcaaggcccagtgaaattgctgcctccttctagaagttttccagcctcaccccaaactgggaatgaagtattccttttctgaaacactgtggtgcttcttccgtctcaccatgtgtcctctgtccacccacccattagacccacatgtcctgacccatctgttggccagctctgccttgggcacagattggctggggtgagcagatgtggctggggcaggactgtctctggaggctttgcagaagagagacccagatctcacaaaagctctccaggccgaggatgtgcacatcgctcacatcacatttgccgagtgaccggggcggggaaccgctgaggccagaagggttaaaaaggcagcttggatgctgagatgagacgtttggccatcatccagctgaccgcgggagccagtggtcatcaggagacagtgtgtggaggcggcatgaatggagaattgactttttgtatctctgccttccccggacaccaggctgtgcaaaataaggcttcaatctctgcgctgcagatccagcctgcgttgagccgaattggcccatgtgggtggggggggtggatggatggctggacgggtggatggacacgtgggggcaggcaaggacacactgtctagttcataccactgcatgcgggcctccgccctgctcacgtgtgctggcttgaatgttgttttgtttctatttgttttgtgaacagatgagggaacaggggctcagtgaggcaagatggcttgtctgtcccaagagctcggattttagccaagaccttctgaacctagggccaccccgcgtccttggtgtagggtgcaggtcaggagacctgcagctgggtgaccagatggatgcattcccaggcgtggggtccacagccagccagttccgtcctcccttctgcccaggatggagacaggtcaccttgcacccactcccaggtatgccccaaagcctctctgccctggctgcccccgcccaccgcaggaaggacacaggaggagcaggcttgggaggaggtgtaatgagccgtccctgaccctcagaagggtcaacctcacaccacccccaacccctgcagaaacccggcaccatccagaaatccctgacctacctacaacccgagccagatgggcctgccccatgccagccggccagccacagcctgagccaagcgggaggagggacagcttccggacgggagcccaggcagccagacccatgtccgcaggctgttggcagggcacagagagaggggaggcagagctccaccagctgcagcttcagccccccaacactggagctttctgctcaggattggtctggggagccacagctggagctggtcggaagcatgacctccaattccaggggcccttttcctttgttgcttctacacacacacacacacgcaggaatactcaccaccacacacacatgctctcacacacttgtgcacacacatttacacgtaccatgcacactcacgtatgattacacacgcatgcacagtcaggtacatacatcacacatgcacacactcacacacacttgtgcacacacatttacatgaaccacacacgtgtgattacacacatgcacatgcaggtacagacaacacacaggcacacaccctcacacacttgtgtacacacatttacacgtgccatgcacactcgtgcgattacacacacatgcacacactcaggtacatacacacagcacacatgcacacaccctcacacacccgtgcacacacatttatacgtgctatgcacactcacgtgtgattacacacacgtgcacactcaggtacatacagacagtacacaggcacaccccacacacacttgtgcacacacatttatacgtgccatgcacactcatgtgtgattacacacacgtgcacactcaggtacatacagacagtacacaggcacaccccacacacttgtgcacacacatttacatgtgccatgcacactcacgtgtgattacacacgtgcacacaggtacatacagcgcacatgcacataccctcacacattgtgcacacacatttacacacaccatgcacacatgcaattacacacacatgcacacaggtacacacaccacacatgcacacacgccctcacacacttgtgcacacacatttacacacaccatgcccacccacgtaattacacacatgcacacatatgcattcacatgtacacacatgcaaatacactcctgcctacacacagtcatacacatgcacacacatgcacacacaaaaatatatgtacacactcatgcacacaatgcattcacatgcacacatagttacactcacagtacatgcccacttatgcaattacacgtgagtacacacatacactgacacgtgctggctcacacacaggcccctgtgtcagagcccagggatggatccgcaggcccgaggttgaaggtgcccgtgccagtgggcaacgccggggttggcaatcatgatgagtcaggagcaggaggggaacgccgaccgcagttgcgatgccgggcggggtggggctcgagctcaaggatggagcagaggcgaagctggccaggcgtccttcctcccagccagcctctgcccagcctcttctctccctgcatcccctgtcttctcccccacccggcagggcagctgcattggtggagtacatctggccttggccactcaagtctgggctggggaaatgtgatgatgaggctaaacgtgagccaagcccttccttccggtgcgtcggggtggggaggagggcaccggggcctgccctcgccctcacgctcccttccccaggaagggctccagcaccagacacattgacacacggctgcccctctcactgtgagcccatcacagcctccctcccaccatctcagtccctgctgctccaccttgccctcagggggacagggtcatgtctgcccagcacctgctctgctaccagccagctcttctcgcagccctgagctggggaggtgcaggacctgtttacacccctcttccctgggctgccctggccacccaggtctggtctccacgcagggcttggcagagctgtgtaagcacctgcccttgggctccgggtgaggagctggataagaaggtggcccctcttcctttccataggggtaggattccaagccctcttcagccccacgctggccccatccctgcacacggagaagtggctgctgcccaggtctacgtcccatgtcccctgagcctgagcaaccccgcccccctcaacccccgctcccagcccctcctgcaggttccgctgagctggctgagcagaaagccaggccctgatggctcaggagagggaagggcagacccctgcccgcccagacctagccagtaccccgacctctctgggacccaccatcaggacccctcactgtcctttgatcccttggcccctcaactgcacctgttctacccgtgtgctcccctgagagggagaggggccgagcgcccacagccagggactgtcctgccggcaccacctctctagcccgcccttgccccctgccaccgcccgggctcactttgagggagtaggccaaggcgatgaagcccaggcagcagaagttgaggtagacgaagttgaagatggaccacaggtaatagtcgttcacctcggtggtgtccgggtagacctcgatgacggtcgtggggttggtcatcgtcttcttctcggctaggtgcttgcaggcagggggcgcgccggcagcccgcacgctgtcggtcttgctgctcttggactccatggggaacagtgtgggcgccatcgggggagaggccgagggctcaggggcaggggccgccggagcctgcagggcagggggcttggacacgcaagcgaagcagcccttgggcgaacctgccgggggcctcggaatccagaaggccccgtccagggggactcgggcttcctgggcgccgtccgtggtgctggccgggtctcccagcggggctgggcactggccggggccctgggcctggagaggagaaagtgagagcaagctgggcccggcctaccggccagcacccaccctcacgcccagcagctccgagaacagccccagtggagacggaaatccctgcgggggccgccagctgccagcctgccacctgcctcccccacccgccccgggcctcggcggccacggacgatgccaaagcccttcgcagcagccttggcagggacctggggctttcatcacttcgccatctgcgcataaacactcacccactgacacacacaacagcaccccccgccccgaagcacaccaacgctgagactgacactgttgcaaaacacagagtgccccagcaccccaaacaaccccgcacacacggggcgccggacccacagcgacgctgcctcagccgccaaccggcagagctagcagagcggccaaagcacctgcccacggcgcccgcggacacccgataccgccacgggcaccgccacgggctccaccgcgggctgcaccgcgggctctccagaccccggggcgcacccgcgggcgcgctcagagccattgacgagtaaacaactccccacacaaggcgatgcaggctcagccacgagcaccaagaaccggcacaggtgcggggtctccaactcgtgcgcaccgccccccacctccaacctggggaccccaagcgcgcacacttgcccggagccacgcacccccgggccatacatagacgcacaataacaggctgtgaaatgaacacttctccaacgaggcaccaagtcgctcgcgctctgcgccaccccgcgttcccagctcccgtgcggcgctcgccggggggtctgcggccgaggctctgcagcccccagccccatccgggtctgccgcagccccccggacggcgcctcctcacctacaagcgactcctcggcgcgcggccggaccccctgagcctcggtgcgcgcgtccttccgccgtcccgcgggccgctgtctgtccactgatccgcctcccagcggcccaaccttgagggggtggggagcgcgcggggctcggcggcggcgccgctgcctcccccgccgcctgcgctccctccgcagcgccagaccggccgcgcggctgcagcccagagcctgactcacggcggcagcgggcacagccacctccccgcctccgcctcctcctgccaggagggtgggggcctcggaagccgcgaccctggggagttgcaaggtcccgcagggatgggacccctacagcccccgaccagggtgtccgcgccacctccatctccccggacccactgcgtcttcctccccaccccacccggccccatccctctcgcggagcccccagccccgtggaagactggacgctcccggaaccctccccatctgcctccccaagagagaccctcttcctcttcccactctccccatggcgctccaccccagcgcctgggccctgctgcctccagggacccccgcccctgggtcctgcccttctggcctgttgactctcagttccagcagctcagtcccctcctgacgaagctccagtcccctgagccccagcaggccccctacctgactgcccgtctctgccccatcctgtccctaaccaagtccacaaggcccccaagaccaccctccagtcccttccctccttagcccaccaagtccaggccttccggtaagtttcagcaccccctactctgttccttcctggctgagcccactcctgcccatcggagctcctgccccctttcctggagtctgacttcacccagccggggccccactccagttcactcccagagtctgggagaatgtggcctctcctgcgcagaccccaggtcatgctccatctgctcgcagggcaaagtgtcccgttccgagctctggtcctgtgctgaggtcctggctgctaaggacacttgtctccctggaggctggtttactcacctgcccacagcctctctgtgatccctaccagcccttctgagcctggtcccctgaggatactttgttccctgtgaatcatttttcctgaccaatgcctgtcctcccagcctcagccgcctccgctaccccaccacatcctcactctcacggtatgcttgacgccagctgatcttccatccccataacagtccccatgagttcctccccatggagaaaactccagccttccctccctccctccaagtcccccacttcaccacgcaggttccctgagctgggtcctcttcaccaacctccagctcccactgagcctcgaccctctccaaagtcccccggaagctgaggatgcatggcggcccccgttttccctccctcatctctctccaagccccatcctcccatgaaactcctttctcctctgccactctcaactggcctcctgtgtctccgcaaccctctttcctgtctggaaggccagtcctgcttggggtcctgtctgcctgcctgtgcctgactctgaaccctttctctccccaaacctctgttctgaaccctaatcccctggaaaagcccagccctctgcaagcccctcctctttccagcctagtccccgcccctcatgcctgggctgacccgggcacagtgttatccacagcacgccaggaacccacagcacaaggctgatcttaaatgatgttgataaaccctaacgagcaggaggggtcatgaagcatgaggagcctcctcctcgtctccttgggcaccctggccatgctctccctggagcccacaggccgtgggtggatggggcctgtcggagaaccagggttccgttctccctccccaactccctcctcctttccaagggcctggcccagggaaaactggacccggtgtcctcagacggggcctgatcccaggctgagtgtggcctgtgtgccatgcccccatgtctccccagcatctgagctgggcttacccggccagccaccaccttctgggagaccctggcctgccacacagcctctgcccagtgctgccccaccccagtttgccctgaaggcctcaggcagtgaggaggcctccatagcaggagagggttgcctgggcccgagggtccagggcctgcccagggtcactgggtaggtgacaggggagccagggcctgctcccggcctcaggccaccttggggctgcctctgaggccaggaaacaccactgagagggagccaggggtcgcagggcagagccagggccgagccaaacttggcacagccagcattcatgtgactgttggtgggctccccaagggcctgggctccagcttcccctttgctaggggtttctggttacaacccacagtctagacagggggggactccaggctcagggtccagtcaccagctagaaaaccacggaggaacccggggtcagactccagggccccgagaatcctgccgggctggagggagccctcggagcaaccccagggcagcagccatgaagatgggagctggacggagctgacaagctgcagaaggagggagatggggagagtgggacagggcagggacaacagggtatggctgcctccttgtacctctctgccctcccaggcctcagtgcacaaagcatctgatgacaggacatttgtctccccagaagccctgccaggccctgcagagttctgcccagctctgctcagatttcaggcatgccaaacgccaggcatgtgtttccaagcctccgtgccaccctgggtaaatgttcttgctccaggtgtctgccgtagcatggctctggggtgaaagccctgcagccccttgggaggaaggccaaggcagccaccaccctcaggcagaggcatcaagataatggcaaatgtcacatctgcctcatcttctaacctgttggggtggggctcgagggggctctaagtgactccagagctactgatcccaaaaggaactctgctcccaccaccacatgcccacaaactcctacttacctattagaaccccaggggctgctaccactgcatccgggcacacgctcccaacccctcccctcccagcggaacaagcgcaccgcgttatcagcccggggatccgtgactgtggcagctgtggctggaggggacttctgagtccaatccctgcaaccagggaccctgggcaggcttgcttggtgccagctcagctcactgcacacaaaaccgcttctagggcctgggaggcaagaaggcccagctaggccagcccccccacgccacctggggccatttatttcccgggacaagagggctgaggagggtgactggtaggcctgctctgagggtccccgagagcagaaatagcctctgttcgagtgccgtggctgcctggctgggccacctccctgaaatcactcctcaaggctggcactcacactagacaccctgaaaccccagccaaggccacatcctgccggctactgctccagacctgggaacaagtcagtccccgctggccgaccaggctggagcccatgggctgggcagggcagggcagggggccataggcccggggcaccccaaatgcttgtcccggtgctgccgagtcagctgccgtgctggcttcgcactacccaccctccttccccatcccaagttggagccacccctgaccaggcacaagagcacaccagcacagaggggaggccggaggccaacaactgtatttccatgtcagctggggctctcagccgcccaaggggaggacaacagaggtcagctgcagaggaaggctggcaccagcccccaatcccaaccccacctccaggccaatacatgcccctgggactggctcagtcccagcaccaccctgcaggctccaacaaggtgggttttgtcccctctcactccttccagctcatcctcaggcctctagcggcctcatcctcaacgggcccgggacactgaacaggtagggtggcagagcccagctgggcccaagctgggcagaggggccctcaggcagggcaggtttccaagggagggcccgggaggacggcctggtgtggggtaggggctcagcccagcgggcgctggtagggccggggaggggactccctggagatgaagggagccccaggatacacgagctcggctgccaagcttgggtggggtcttccaatgcacgaaacagatctgtgctctggatcagctctacccccaccaaacagatggagagacagacaggcaggcagcatttctgaacccagggaggggaaaaccacagaacaaaacagcaagtcgggcttgggccgccggcttccagggcgcccaggacagtgggcgggcgagtgtgtgggtgtgtgtgggaggggccgctgggccaggggcctcctgctctgggactctcctctgtttctgtgctggcgcgcggacgccttgggaactagaggcgggcagcctcggcgaagcccaccctgttgttgtcacggtcaaacacagtgtagtagcggccgatgaagacgtcgcccaggatccagagtggcccgctgggtggcgggatgtccatgcccatgaagccgctcaggcagagggtcttcccggcctgcgacacctgggacggccctggtggtcagtacccaggcctagcaccacccgcccccccacctgttgcccgctcacctggagcgtgcgccccctcaccgcccgctcacctggggcgtgcggcaccccattgcccgctcaccttgagcgtgtagtcctctggggacagcttgtagcctttgcctcccagcttcagtgtgatcgcgggcagggtggacaccttctcacaggggatcatgtactaagaggggtcacagcagtgtcagggtggtagtggtggccttggggctccccctgccagccccagccccagccccagcccccggcgctcacctcgccctgaatcagcggcacggccccgatggccttctgcagctcgcgcacctcatccaccgggcccaccatgagggaagtgcctgtgtccacaatggcctcacagccctccttgcacagggtcagcccgctggccacctccaccctgcggggagtcagggcgtgaagcccctgccgggactggagtgtgccctgggggcccagtgcccctccctgggagcccctcccctggctgggctgcactctcctcccctcagggctcctggaagcacagccggctgtaagccctccagggaagagggtgggagaggagacacagagtggtagagggggtgggagaccctcaggtggtggtgaggggcatggagggatggaggggatggaggggcatagagggatggaggggatggaggggatgaagggatggaggggcatggagggatggagggatggagggatagacagatggaggggatggagggtcatggagagtcacagagggatgtggggatggagggatggagggatggaggggatggagggatggagggatggaggggatggagggatggaggagatggagggtcatgaagagtcacagagggatgaggggatggaggggatggagggcatggagggatggacagaagggatggtgggtcatggagagtcacagaggcatggaggaaatggagggatggagggatagagggaatagaggggatggaggtgatggggagcatggaggggcaaggaggggcatggagggctggtctgaccccatctctttcttgcccagctcccactactccccacatgcaacccccacctgcagaaccggggtcctccagggtctccgcacaccgcccccgcccacagaacccaggggagccgactgcagccactactcactggtccaggtggacctgccagtaggccttgcgggtgacattcaggtaggacagagaacccttgtaatacttggagtctgtgccacccagcatcagctcacccccaggctgcgcatctgggtccctaggaggaaaagggaggagtcagctgccacgccaccccccaagcacaagagtgccaggtcaggagtaagagggtgaatgtggcaatcagggagagcttcctgaaggaggggcctttctgaaactgcagggatggaaaggcccagaaggcaggaggagggacagactcccttcttcccggggtagggctgctctgcgtgggcccagcctggcccagaagaggttttcctcaaccctcaggttctcctggtctgctcaggagccaaggttcagccagacatcagggtcaaggctagcggcagacaaggaagtgagtgccaggagctccactggggaggaccctgtctgtctgtctggaagaaaaaaccaaagaaggcttccaggagggagtgatggcacaatctgggaagttgggatggctggttctggccgcagggcctctgcactggctgctcctgggaacaccctccacctgcatccccgagccacgtccgctcatctccccctcatccagaccactgatggccagccaaggtgctcctgggcaggagcgcactgcacttcctaggacctgcaacccatgtcgcccgggtttgtttctaaacattgctcaagtacagctttcaacgcagcaaatcctgccggtcctggtagagaagctctctgtgtctggggcggttctgccatcccgccagagcgtctgcagctaagctggccaccatcccactgcctgtcactcgaggcagtgccaggcctgacccagtcctcccaacaccgattggggcctccgccctcctccagcctcctccgcctttgcctcttgtcaacacctctgcaatcccaagtgtagaaacctgatcagcgcctcccacccctcctctcctcaccaaacatgctttcagaagccctcagaccctccctcctgcctggctccacttcctgcccaagctgctgccttgagactacacctgggcactcacaaccatgtgcacctcccccacctgggcactcactctgtgtgcccctccttccacctggcactcatgcctgtgtatgcctcccccgacctgggtactcataccgtgtgcccctcccccacatgggcactcatgctgtgtgcccctcccccacatgggcattcatgcctgtgtccccctccctgacctgggtactcaggctgtgtgccccctccccatgtgggcactcatgcctgcatgccctcttgccctcaggggaccccttttcacctggctgcctcccctgtgccccaaggctcctggggaaatggcccagccggttcacctgtgtcctggcctctagtgagcagcttagccctgggtgttgctaaggagtattcactgcccaggcaaggggcagagcaaagaggcccagccagccctacagccggaattctgccggaagcgatccaaggttaggggtcaggcccagagactccaagtgccaagtgagccacgtgaggtaaacctgcccctgtcagccctggagagtgtggggcagtgaccaggcgcagctcagggcaggaggccgccggctgacacgctgcccacccccaaaacaaaagcccccaacccccagtcacccctcttatgtggaaccctccactcaggtctgccccgagaagaggaaactaactgagtccgacgtccccttcccaaggtcacctgaccatgggtcacccaagctggagcagcggctgcaggtgggggccctgggggagaacccttttcccagaaggaagggccccctatgttcctcctcgagggcagccggcacctgctggggacgcccacagagctgctcgcagcgtggtgccggggacccatacgcacccaaggtcacctccccggggatccccggtcccctgggcaccatgaccctctccaccatcagcaaccccgggaccaggaccacatgtgcccatcaccaggtctggggaccgacgggccgactgaaccaagaggaactgccacgacccctgacctgggtccattctcataggagggaggcccagctgccaaggtcccaggacccacagcctggcccgagcccctcccactgggagaccccggccaaacagctttctctgtgctgccgcttactcctctgcagaagggcggccaacccccgcctcccggatgccctgaggtcagaggtcaggagctctggcacagcagcagggagggggcagcactgagagggggtgcctagaaggctccccgtccagccccgccctgcctcccagcaacgcggagcgagagggaacccacacgcccacctgctcaggtagaaggagaagatgttctggtccaccagcttctgctgcatcaggttgtcgaagacgggcagcacgttgttgacggagatgcgggggtaggccatgcccaggatgccatcgaacttggctgcgatgaaggtgatgcctggctgcttggtggcctccccaaagacctgcctctccactttgacaccgcccagggcagaggctgacgacgctgactggcagggcacctgcaggccagggcagagtcagtgggcagcagacaggctgagccctacaccactccctgagcatgaggctacaaaacccagttcaatggatgcccatcccacacacgatggggcccagagggcccagaagaaagggctggaaaccctgagctgaacaccgctggggatggggacacggggtatggcggggccctcttcgtggaagtcatcagggctcggtttacacgagatgggaaccaggcaggagcacagacgggcaggccccttgctccgctccctgctccgacctcttactcccaccaccaatgacaggcaggtcctgctcctgccctcagcgctgggaacaagacacagcctgggccaggagcccgagagatggggaacctgccgaccccatcccaagctcacagccatactgcccccttccccttctctgcctgtcccctcccccagccctggatgaggctgcagagagagaacacggccagagcaggatgtgggaagggaacgacagcttgaggctgacacggggcggagggggcagaagagggcggaagagggcagacggggcaatttcctgttcaggctgagcagggtccagacaggagggctctgaggagcccccagtacagactggactccagcccagcagggaactgttaggagcagcttcagctggaggaaggggccctcttcccgggtccctgggcctgcaggggggctctgctgccctcctggcccgctccagagctgggggctgtgtcaccatcccgtaactcctgaaccccttgtggcctggtccacccccagcagacagctccgaggtgagaactcactgaggcccaggcagggtgacaagggccagctcaccctctcctagggcagggagttgctctgcacagggccctgaggatggtggatgcaggcggggcccccaacagccactgctgctccccctcccttgccctcccaggctcctgccggtgactctccgccagcagcccccacagcgggttcctggtacatcctcccaaccccaagcctccccaagccctcggcctgctgcagggaccctgtgcagccccaggtccagccctcaacacctgctggcacctcaaacccaatgtgccaaaaagagcccgatcgatctgccctgtcctccctcccactcattgtggcctgactccggggacccctgcccctgtaccccctgggtttgaggctgtccctccagcctgcacacaaccaggcccattcccagacccctcctcaccctgctgactgccccggccacctgagggctggggttgggctgggatcaccgagccctccctttcaaccacatacccacggtgggtgaaccccacaccctggcaccctcgagtcctgggaaaggccccagagggactcaccgacacagtgtcctggctcaggtacccggagaggctgcccgagccatagtggatgtcaaacgaggtaccattcttcacgtaggtgctggacttgtcgctgttgtacttgtggtggatccctgccccgggcgacaagggggcccgccggtcatcccgcagcccacgccacggccttagccctcccatccccctacaatctaccatggagcccgcaccccccaagctgcctccccagggtgggatttggaggggatctgaggcccaccatcatgccagagccccgggactgtgggctgtgaccccgggcctccctcccagccacagccggctccctctgtggccaccccagccccagccctgctgagagcaagaccacagctggtggttcacccagaaagtcagtggctggagcagggtggagggctggcctggctcacggggccaagaggcaggagaattgcgttgcccaagtgattcctgaggcagccctgcagcgacatcccggaagggcaggacctgggcgacggggccagggttcgtgactcacagcaagcgatgtccagcagtttgcagtggatggaggggacccacaggttggaggagcccgtgtcgaagacgactgtgaagcactgggggggcgtcccgatgccaatctccccgtagtactgggcctggcaggggacagggtccgtcagggatgggagagggggccccatctccccactgggcctcagaaggcccggctgtccccagagccaaggcccatactggagggaggggcatcacggggcccacagctgccaacagccacccactcccacctgctcagcctgcagggaagatgggccaggtccccagccctcggtcctaatgcccacgggtacttggggtctctagacccctggcttctgtcacctacccctgctcaatacatggtgaggctgaggacttccccacggaaaagacaaggccagaggtcaagccagggtggggacagacgtggccctcagcctgagccccgggtgcaggaaagcccggcctggaagactcccctggtggcccgcagtccaaggtctgagaaaggaagtgacttcctccccaggttggggccatgtcaaggtctgattctgggtgtctcagtgcctgccctgccctccagggtgaaccccaggcttggagggcttccaggcagaggggttcagctggtcaaggggagaaggtaagccttacaatcactgcctgcccagcaaccctgccttaatggcccagggcctcagtttccccgtgtgtacacagggatagcaggcgcaggtgggggtgctgactcagggatcaggcaagtacaaggggtcccatgccgccgagcctctcaggaggcagagagtaagagggtcctggagtttggggtcgcctgggcgcccgcttcccccaggattggagcctgggccaccgtcagccaccagattcctggcaccagcccagcccaatgtttctccaaccgcctggcttcacggagcagcagcagctgctgactcatggccccacagaagtgaccactggcagggggacactcagcaaatttccatgtgtgtgtgtgcatgtgtgcgcatgcgtgcatctgcttgctcgcgcgctaggacaatcaggaactggccagtcgggaccaggcacacggcgcctggttccccccagggcccccctggcccagtcacatgcctgtgagtcttgggcttcctgtcacagccaggactcgggccaagcaggacagagggcaaggctcccccacagtgggccagagccccgaggctggacagtaggccctggcctcgaactgaccccatagagctgggaccaggctgaccaagccccagcttgctaggtggcttccagagtgctccaccttggatcctgcttccccctgaaggagtagtgggcacaggaggggctgttgcgagaggaagaagatggggaggggctggggaggccacgagtcaccacaggcctcccagcaggacagcagtgaaaggctccaggtcagccggccacactcaggcaggcccaaggaccgccccctcaggcgagctggcaccaaggcccgaggccactcccaatcaccctcccaggccctagcaggaccaagaccctgcaatgacaggggccagtggcaggaggttccagaatggggaagaaaggagtgtggctgagccgggacgccaccgtggccaggtgagccactcaaactgcgctgctgagaacaggaggtgggaatgttccccatactgccacggagctctcctgacagtggctccgcttgcagcagggctaagacctcatactcacgtccatgtagttcttgagcacctcgggaatgggcccctcggtcacggctggcaccgcctgggagtactttgagacggggcctttggcaatcaggtcctccacagagcccccaacctccgacatggtccggcggatggacgtgaacttgtgcagcgggatcctgtcaaccacgggtcggggcatatcagggaggccctcccgcctgccggccgacgctgccaatgctgcacatccacctggaggcccctggggaatctcagagtcgccacagccaaaaccaaactcctgcctgtcacctggaaactgctggcccagctcccccaagtcagtgaatggcaacccattgccccccgccaggttgcacaggccacagtcctaagaagtggtcacccgccacccacctcagccccacacacccaacctgggggccagtgtgcccaaccctcctctcctcagccattctggaggctccaaagcccccaagggtctcccgtcctccctctgcacctgcgctggtctcttccaggatggtggccagcatggctgctcagggtgctggcgggtacctgtcactcctgcccaaagtgctctgaggcagcccactgtacccagcccccatcacacctgctctccacccccagacacctgcacgaaggtggccccacctccaggctggcactggcagctctgcctggcctcctctggccatcagatgggccctccacaccacctccagaagccctccttgactacctgtcctcctccacatggaccctgtggctgcccagtgccctcatcccacatctgtttctgggcatccgcacctctcctcactccatgcggctccacgaggtccaggactgcacctggggccttagaggcttctgtgctgccccccccaccgccctgcctcctccgacagctgcactcagggtacccctccagagtcctgtcacccagcacaccgccagccagggtgcaggagggagctccagactgagatcggggtcctgagttctaaacccaggaagcgagtaagagagagaggggtccctgctcctcccccagggccactggccttccccttggtgtgaacccactccttgttccaaggaagctcccctgggcttttaatcacttaaataaaacctcttccctgccccagggacttgagagtacaaggtcatagctggcttttcctggcttgtcaggggcgtgatcccggaagatgagattattgcctaagagctggtgggctggaagagctccaggttttgtcctgggggagggacacgccctccagggaccaggaagcaggtgtaatagtatcagtcgcacaagagctggaatcgggtgagggcttggattcagctacccttccctccaagaagccccaggatcgtttcccctctgctgtgtctgtcctccttggagaggggaggcctgtggataggctggcaaggtcaaggcaggctcaggcttgtggctactcccccacaacgactttaattggggctacccgcccccgggccattccccacagcctttggtgaggctcagtcctacccagctggcccagccagctccagcccctgcagccttctgacctcacccacctgccaaaaggcagtggacccatcgcagatcccaggtctcccacaaaggcccagagcaagggtggggcaggtgcccaatgggatgggtcagcatacccctcctgggaatgcgggctgccttgcaagggctggggagggggtcaagaaagcagactgcagcatggccctcctctgcccagctggtcaggcatggccgggccccatcccatccaggcccaatcggtggcctcacctggcacaggggatcggcctgaggagcgtgtgggcctcactacagcacaaccccaggcccggggtgggtgagccgacccactccccatgcctcctcctctctcagggacatgggaactcctagggtctcgaggggtctcccagcccagggcctgtgataagagccgctggagcaaacttttaaagcccccagttcacaggtggtaaaggggtccctaaggaaatggactcgcccagactcgggggctctgaggcctgacctaggtctccagcaacaagggcgctcagtacagaccccaattccacctgccccgaatgagcactacctccccccgccccgccccgtctccagggaggctgcggtcagtctgcagtcctcaaggtacaacccagggtggcatatgggggagaggcatctggcgcctctgccccgggtcccctgcacctccggagcccggcgccccgtaggcgggtggtccgtgcaggaggccgcgcagggcggcacaggtgcattccagcgcggggggcgcaaggggctcgtgggggccacaggggagcgcgaaagtcaccacaggccccgggacctcggcgccgcgacccctgcccgtccctgagccccggcccctgaggcttcacctgacgagcgcggaggcgggtgcagccagcaggcagagggcgagcggcagaaggctggagggctgcatggcggcggcggccgggtcggagagggtcgccgaggccgtgcgcttatagccgggatgacgccgcagttgggccggatcagctgacccgcgtgtttgcacccggaccggtcacgtgggcgcggccggcgtgcgcggggcggggcggagcggggcctggcctgggcggggcaacctcggcgcacgcgcacagcgcccgggcggggggcggggtggtggtgcgcctgccgcgcctacagttcccgccgctcgcgcccgcggggtcagcccggcccagcttctggggtctggaggattcccgtttcggcctggcctggggtcgtggggcggcccaccctggagggccccgcggggtgacccctgtcccggccgccgcggccgtccccgcgtccaggcctgcgcggggcgctgcgccgtgggctcctgcacctgctcctcccggcgccccctcgtccccctccgagacgctcccagacatcctctctggaagcctcttgcaaaccaaggttaaattcaaagtccccagcccaccgaatggaccctccgctcctctacagggcttccagagaaacctggaaaaccagctcaggccctgccgcaaagggggtcggacccgctccgccctctccctctgggcgctgtgcttagagactcaggcctcaccgatggctctagcctccagatcccaaattccagcctcacactggcacagcctcacgtggcagacagcaggcccgaaggcaggcaaagtattccaccctaaaatacattcctttcacatgttttgatatggcactgcacagctgtctcttgagggggcgaaattcgcgttttctagagaagctccttcccttaggaggtcgggcaccttttgtccactcacgtcaactcttttttttttttttttttttttgagacagaatctcgctctgtggcccaggctggagtgcagtggcatgatctcggctcactgcaacctctacctcctgggttcaagcgattctcctgcctcagcctcctaagtagctgggattacaggcgcgtgctaccacgcctggctaatatgtatatatacacacacgtatgtatatatatatatacacacacacacatatatagtgtatatatacacatatatatacgtatatatatacactatatatgtatatacatatatgtatatgtgtatatatgtgtatatatacatgtatatgtgtatatatgtgtatatatatacatgtatatgtgtatatatatacatgtatatgtgtatatatatacatgtatatgtgtatatatatacatgtatatgtgtatatatatacatgtatatgtgtatatatatatacatgtatatgtgtatatatgttttgtatttttagtagagatggtgtttcaccatgttggccaggctggtctcgaactcctgacctcaggtgatctgcctgcctcagccttccaaagtgctgggattacaggcgtgagtaatcccactttaactctttaggcaaaacataactctttcaaccacttgccaatcaggaaatctttgaatcccctatgacctggaagctgcccctgccaaccctgtttctaggctgaaccaatgtatatcttacatatgttgatttatggttttggcctgtaacatctgtctctgtaaaatccgtaaaaccaggccgggcatggtgactgttgcctataatcccagcatactcggaggccaaggtgggagcattgcttgagctgaagagcttgagatcagcctgggcaacatggtgagaccctgtctctacagaaaagacctgaaaattttaaaaaaaagtataaagccaagctgttacccagccaccttgctcacatattctcaggacctgctgaggtggtttcacaggtcatagtcctcacatttgct

SEQ ID NO: 379 - DNA, 255072 bp, Homo sapiens
  source 1..255072: mol_type = genomic DNA
accaatgtcaccctgggcaaggtactccagccctgctgctcagtttgctccactgtaaaatatgaagataatatcttccatgtaagatagttgtgggattaaatgagatcatgtatggaaattataaagatgttctatgattaataagtacaatttggccaggcagtgattaggcctgtgtatgtgtataagatagctgttacaaaagtaaaatattttctgtcctccagaagcttaagtgtaactgaacacgcatttggggataaaacggtggcagtagaagaaatggcattaatacaactaagggacattcctttctaattgttatcagttacactgcatacccagtggttgaaaataaaaattggttcacttcctattggggattacctaattagttcctgatgtgtcacttggtaggaagctatgaaatttttaaaaaaatgataaagcttctggccaggcctggtggctcacgcctgtaatcccagcactttgggaggctgaggcaggcagatcacaaggtcaagaaatcgagaccatcctggctagcaaggtgaaaccccatctctactaaaaatacaaaaaattagccgggcgtggtggcgggcgcctgtagtcccagctacttgggaggctgaggcaggagaatggcgtgagcccgggaggcggagcttgcagtgagccaagatcgcgccactgcactccaacctgggcaacagagtgagactccatctcaaaaaaataaacaaaaaaaaaaataaagcttctaaaaaatgatttattgtaaacttccagtgggcttactaataggaaaactgtttatgtagggtgattgagaatacttacacagctatttttaaattgtgtgatgtgatgataatgaccattatacaacaggagctcacaattactgaacacttctgtcccaggttttgttctaagtatacatggattctttcatttcatgcccacaccaatcccatgaggtaatcactgttcttgtccctatttttttctgatgagaaaatgaaaaacagagaggttcagtgtttttcccaaggctgcagagctggaaacaggcaaaatcagaatgtgaactgaagaattctgactccagatcccatgctcttaaatgcttttaaatgctcttcagagcaacctttctatggatgcacagctggggctaactggctcgaggactgaagcaaggccaatgctagctagtttgcatagcagatgacaatctgttcctatatgcacagttgaaaaagttgagtttcgcctaactggagctcaggaagaggatatgtgtgacactgattcctagtgggagggagggagaggaggtggggagtgggggaggtgtgttcccatcattgatggtcctaattcttccttcccactaaggttctccacatttttaaattgctggaatgtatgggtaagaacaacactagtgaattccatctctccaacagcctcgatgaaagcagtgtttgattgaaaaaaatatgaaatttaattttagacatggcaagttcaattacatcacttcatatcacagtagaaaatataatttgttctaccatgggaaatagtataatggaatagatcacaatagtagtataataaaatagaatatccaagtgcaaaaacaattttcaagtaagtacacacactgtttgaaggtactttattaagatcaaagatttttcattacatttatttataaatccttcctagtcaaaataaaataataaaaatctgtatctttagaaagaacatagttttgtaagtctgagaaggttatgtttgtcagtttcaaattattacagtttagatacattcaatcattacacaataccaggaaggtcagccttaaagataccaagaacttccatattggtcagtaaaataagggtaaaaaattaaattttactttcacctttttatgtttgattgactacagtcaataataggagtacagaatttactttttggtcttgatttttaaatatatgaattttaaaaagtgaacgttcctcttctcttacatagtggctccaacttagggagctggcttctggagggaggagtgctattctccttgctggagaaggaggctgggggaagaaagtacagaattcagggcctttttgctgccgttgtcaatgaactctcggagttggccctgccttattaaattttaatcaattatctttctaagcatcaagatggccatgtaaacactgtttttaagaccacgtctaccggctgggcacggtggatcatgcctgtaatcccagcactttgggaggccaaggcaggaggattgcttgagcccaggagttcaagaccagcctgagcaacatggcaagaccctgtctcaaaaaaaaaaaaaaaagtatactacctgatttctaaaattaccaaagtgcccccttttccccccattatttaaaaaatattgttctagctctgcgcttaaggtctggacctttcttttttaaaatgttatatttttataacatcttattattaccaccaccaaaaaaggactcagtttctcccactttacactatatctctgtccccaaagtaaataactgaagcaattatctgcaatttttttaaaatgtgggtatttcagggtaaagaatttggactgcctaaattactcaggtgattgcctgaattattacatatgtcccatcattctttgtacaagaagtcttgatttatagaaaatttcagacaatgttcaaagaaggaaatatgctacccaaacaatctacttaagacttcaggttggcaaccctccctctttcattttttaaaaacaaaattttttgctatttaattaatacacttagaactcactgtctggatcacgttgttatataatacttagtctgattatctattttggtgtgactatgtgtcaaggccattggagtggtttttgtctctgcttctaatatgaacttgacaagtatgaaggaaaaccagtgaataatgctatcaaatgtgcagtgcacagatcgcacacttggatctatctttgtaaagctcaaatatttacatggaatgttgaccatgatttataaaactactcttttaaattaggacatcttgacatacaatcagtttattttatgaatagccccgtttgatatttaaaaaaatatgcctttaaaatatttcataaatatatagaattttactacattctattttttttcacatgacatttaaactctctttacaaatcaacaaaaaaataacatttttttttccactttgaaagtcacagatgcaatgattttcgacgggcagggcttcactgcatgcaagaacggcaggatatgctctcttatagaacggatagacatttctagcattttgaattatataattcacttgctgaaaatcagtagtatcaaagaaaagtgagagaacccatctaaatatttacaatataagagtctttcctaaacttctttaacaatggcaaggttaggatggtgtctggacagtgttaacaagcattttgatgacaaagaaataacatcacatgaaaagttttctaaaataaatcttagagcaatttaaagaggggtgatctattgcacatagatgaaaaataatctttaattgtatcagtaatatgtaaaacaggttttacatgttttagaatagaaatccttcttctaatttattggaaaaatccaaaaccagctaaaataacattttgggtgacttcataaattgtcttctgaggaattacaaataaaaatatcctttgtaatcatttcttgccacaaggctaccattcttacttatattaatcccaaaggaaaggcttttcgttacatatataataactgttaaaagtctactttcccttattaaatgttgttgagtcactgacaggtactcaaaaggacttctcaagctatattatgaaggccattcactcaaggtaaaatttcagttactcctttaagaattattttaaaatgcacacactgtgaacgtattgcgaatatgtaagaaagtctacactttttgaatagtaagaggacaccttactgcctgcccggctaaatctgtgatgatccacccagaaacagcagagctcacctgtctgtctggagctgctcatggctgctgaattgataccttcaacagctaacattcaaactcgacagcagcagccacacctgagaccagcagaagcgctgaactcccatacatactaagcctctagctaagtctctctgaaaatttcagcctcatcttggagatagagcggtattgaagacaacgagaaggtttgaggttttgcttagaatacagtactgtgcatattttgatttcggatcttatactaacacatggcgtttgaaataaggctgtaaaaagatacaaacaaaaccagcattcaacttgaaccaagattgtacatctatgacagtgatatagatttaaaaaccctactaccaaaactgtaattgatttcatcatgcactctatagaaaaagacaattatggaaatttctcttagttatgaatgtaaccagctcactggcacccaatgggtctctgtctctaatttgtcaaaagttgttttgagctcattgaatgccacagtgaggtcatcatttattataattttgtcaaaaagatgaccatattgactttccattatctgtgcagatttaatcatttcttgaaaatcttcttcctacaaaaggaagtattaaaaaaataattggttaaccaggccattacctcacttcatatcaatgcaaacattctacaattggtttacctaatgctgttctgtgttcagtctttcccctcagccagaaataaaagtcatcctctttaaccacaagtgcttcagaagccataatttctaatactatttctatgatttgcttgtaacaaaaaactactctggcaagagtcaaaactcctgccttaactgaattgcaggataatgagtcactagtcatcattatggggaaatgtcagtattaaaatagctattggagaaaagaattgtttactctgatgttttggctgcattatttatgcttattcataggaaggaatttataatataaactcctttttcagagttggacaaatttgtaaaaggatgattaccatgttttttgttttttgttttgagatagagtctcactctgtcacccaggttggggtgcagtggtgcaatcctggctcaccgcaacctctgcctccggggtcctagcaattctcctgcctcagcctcccgagtagctggaattacaggagcgtgccgccacacctggctaatttttgtatttttagtacagatggattttctccatgttcaccaggctggtctggaactcctgacctcaagtgatccccacctgcctcggcctcccaaagtgctgggattacaggcatgagccaccacgcccggctgattaccacgttccttcgatgtctcattaaaagtgtttcaggagccttcgtgtctcacatttttaaagccaggaagtattttagttggctatataacataaatgtaagagagccaaatcctaagaatatgtgatcctttcttatcttcgttgagaaacctttaaaatgtctaaatagtacaataaatctttatgttgcaacatgctgaaataatttgagtctgcatttcattgtcacataagatttcacaataacagaaaatttaattttagtgttgatcaagagcctgagtaactaacattgtatgacagtacctactcagaacggatatgtactgttggcatgtaaaaaaaggtatttatcaaatatactgggaatcagaaatgtgatctgtattttgtaaccacaatgaacagttcataaattaatataaactaaagttaatgatgagctaattaagaggggcaagaaaaaaataagctcttcacatttaatttctttgcttttgatttttggtccaaaggtagaatatattaagattaagaagaaaaacaataaaaggtcttgccagaacccataatagtcatgaatataccacaatcatcatttccaataacactcatagaaaatacaaatattattgctgaataatattggtctacttatcctatacccaaaatagtgattttcttttgctgtgctaaatataattgttgacacaaggagacaagcaaggcacattattaaatttttcatttggactcttaatgagtaacagttactgatggtatttttagctttaaaaataaggctgctctgaaaattaattggtctagattttatacaaatgttcagcctacaatagtatgaaatgttcacataatagtatacaaaatagttttgagtcaattgaatatgaagatccattcaccaaagcacaagaagtgtaactgttcaaaaggtatgtacctaaatacaattctttcactgatttttgtatctattatactcttcccaagtacatgcagctgtatatatgttttcatatatacaactgtatcttacatcttatctactgcttatatcttatctccaagctttttgtggttgttgttgagacagggtctcactctgtcgcccaggctggagtgtagtggtgtgatctcagctcactgcactctcagtctcctggggtcttgtgatcttcccacctctgcctaccaggctggagtgtagtagtgtgatctcagctcactacactctcagtctcctggggtcttatgatcttcccacctccgcctcccaagtagctgggactacaggtgtccaaccatcatgcctggctaatttccatattttttgtagagatggggtttcaccaccttggccaggctggtcttgaactcctggactcaaatgatcctcctgcttcggcctcccaaagtgctgggattacaggtgtgggccaccacacctggcccccaagcatcattatacttactgtgaagggttttgcagcaccttggtcatctctgcttgaaataatctttgcattttttcttgtttctctcaaacgctctattgatggaggctttataaatatcacatagggcttaaattctagtgtccttaaatgcttcactgtctacaaggaagaaaagaaagttttctcacatttctccatagcatcatgaattactgaattttctttctaggagaaaattcctcaaaattattctttaaggtcagtagtcatttcaatatattattattcaattaactgttgacaattaaatgtaacaaacacttctgaaaagaagctggggaatgtaacttggcattttaaaatgttctgaaatacatcataattaacattgaacagaagtgactaaaaatatcacaaaactggtttttagatcaaatattccaaaggtgtgatgagttaaataactttctgtccacaaatgtcttccaaccatcccttttaagcccctttctgatttcaggcaggagttctcctctttcaccctatccttcagagtaccctacaagggcagcctcctgctctccatgatgcctgtctagattccttcatcaaatctttgatgttctatactctatacttctggggacctatctacagagggtgagagctgaaagttattattcatgagctgatactacactgtgggagtctgacagcaactggacctgggacaccagcagagaggctctgcataagcaggactgtcccattcactgttggtgcctgatatggtttggatctgtgtccacacccaaatctcatgttgtaatgtaatccccactgctgtaggtgcagcctgtgggaggtgactggatcataggggcattttcccggggtttaacaccatcccccttggtgctgtcatcacaatagtcagttctcgtgagaccctgttgtttaaaagtgtgtggcacctcgctcctctctctctcttcctcctgctctggccatgtgaagtgctcaaccctcctcctttgctttccgccatgattgcaagtttcctgaggcctccccagagctgagcagatgccagcatcacgcttcctgtacagtctgcagagcagtgagccaattaaacctcttttttttttttttttttttttttttttttagtaaattacccagtttcaggtatttcttcagagcagtgcaacaagggactaacacagtgcccaagtcaggaggcagccttcctgattcttgaaacacttttactccagattcatcttcctttagaggtccaaagggcttccgcaggtcattctagcatttggaggttttgcaccccagggtacagccatcagtggaaggagaaaccatggtccctgggggatgaggaaaatgctgtgggctggggatctgctggaagatgtatggtttgatagggaattgaatggcctcatccactgaagttctcagttcagaatgttcataatggagtttccaggatgacaggtgcagacatggcagttgcaatggggctttcattcagtacatttcctgcaaaatgcccttcagttctagtggggggttatttgctaggatatatacagaaccaaagtcaaagacttggaaccaaaatgtccatcgttaaaaattatagacactgttactaatacataacacataagaatgcattatgcatgtaacaatgtgatgtattttttaaaaatacagaatatgtagaaacatctaagagttgctttacttgacaaaaactgaatataaataagagttacaaacacaggtcttggagcttcctccacttctctttctaataatattatgggcttttctttttctccaccaaagatgtctccaattatatttaaatgcttttgccatctcagaaaagccacatatatgccaaaagtgagttgacttcatattatttcatactgaaatgctcacatgaggtgctgtagatgacatgggtcagaagggtattgaatagctcattgtttacttacatgaggctgaacatccaacaaacaaactttgtttttagcaaggacagaccgaactgagtctatacttgtgccgtagtagttgtttttatattctccatattcaataaacctgtaaaaaattaaatgcattggaatcatttgtgaatttaaaacaattataggtggcaagataaaattcataggtaaaagacgtttctgctgaacacgtaatttttttaaactgtgtttaataatataaacagagccaagtatttcaaaatgtcagtttttaaaaaatcttttattatacattttcaaatcagtaacacttgcttaaattacacttaagcagaaaaaaagtactttagtctagtagggctctaatgttttccatcaccccctttttcttcagaactaatgcaatgcaataaaatggtgaataagccaaacaatagaaactactggaatttcattgcacgctacggagtaacccagcccagcttcagaactagaggcgctgggtggtggctaatggagccagggcagtcgatcatgtgctataaaaacacaatcactgcgccaaacacgaaaaaagcatttcgatgttttaataaaatcccacaatcctgcattaaaacacatattgcttctgatagcctaaaatatttgtgcctcagcagatggaaaacctgggcagggggcactggggtgggcttggagctagctagagaagacggtaccagcaagttaattatcatcatttcaattttttgaagagccaatgagagaatgagatgcaggtgtgtgaagcagacgctggacctagtgatatactacatagttgttggtttttgaagtaaaattctatccaaattacatgttaagattcaattagtgggctggaaggaggtcagaataagacacttgcaaccttccctcattctgcaaagcagtgtctacacattttatagaaatgaagcaaatccaggttactaaaaaattagaggtgaagattaacaataattaccaaccaaattattaccttttcatctgtttcaaatattattatgataattaaaatacacttcaaatggagaactctcagttgtctaaaacgggacaggcatgtgcttataaaaaacagtcacatgaaaattctcaaaaatgtccacatacttgttattttgtacatctgtctcaaacaaatgcttggaaatgaaaatgtattcaacaccatcactctcctggcttcttcttgctctggtggtatctatgatttaatgaaaaggagtttagaaaagcccacatcagccaccttaaggaaaatactaaaaaagaaatcaagggtatttaattagttttttcaacaggatttaaaaatgtatttaaaaagcaaattagctaataaaatacagtaagctgttataaatccagattttccactgttattaaaattatattgatttgaagatgggttaaaaagttaattgcattgtatgtctctgctattatttgctattttgaaggctctctaacctgatacaagagtgctatttaaactcctgaggaaaaaaaccttttttttttttttgcaaataatatgcttattatctttattgatcttcattcattaaagcaaatctattaaccactaagttgttagataaactctgaaactgtttgactctcttcttctcatgggacatagtgggtatgccatcaaagttttgttttaccagccaagtgaagccaaatacttctgtgtgctactcattcctcctttgcaaagtcataaatagcatcatcttagaatactattgaacttctaacctttcagtaatcttgcctaattatttattaacgaactaaaatggagcagaaaatataggattcattaaaacgacaacatgaacaaagcccaaggcactccagtgctgacatggcaaatgtaaacccactacaggccatccttcctgcagatcccaactaaaaactatggatgccaagaaactacccgaacactttgaaaataagtaaagcaggtagactgtagaggggagtcaaactgcacggggaggagtttaactctattttcctcttagctttgccccaagggtgggaatccttcgcagagcagcatggtagaatctgcagcaaaatgccaagagaagccctaacgttctggtgcaaagaacttgggacggggggtagaaaaagtccttgtgggctgtaaagtgtggaggaaatccaggagagaagaaagctggagaagaaaatacttcacttctgtgtatgagtcaacaatagtctaagaatcctctctgtgctacacacatgtagttcaaactcaaaccagcacggcaaaggccttatgaactgagagtggaatgtacaggtttcagcctaacccctgaaaaagagtatcgcaaaacatatctaagccaatgaagaaaaggcttaaagaactgagctgagatctgaaccatgcacacaagtcttagactaatccttgcatcctaacagacccaaatcaatataacaaaggtgagataaaagaagctggcagctaaaataaaaacatcaacattctcccgaatatggtaacaagacctagtgttaatacaacattatattcacaatgtccaaaatgcaatctgaaattattcaacatgaaagaaccaaaaacaaaaaaaaacaaaacaaaacaaaaaaaacaccaattttcaaggggaaagataacagatagcaaccctgaatgacctggaagttagattagacataagtctttcaaacaggtaccataactaagcttgaaaaggtaagagaaaatatacttgaattgaacaaaaatataaattcttagcagaagaacagaaactataaagaaaaaaacaaatagaaattgtagaaatgaaaaataaaaatatccaacagaaacaaatcactagatgggcacaataacagaatgacagaaagaaaagccagtgaacttgaagacagaacaataaaattatataatctaaacaacaacaacaacaacaagatttaaaaaatatagatagaactccagggacctatgagaaaacacatatgtcataggagtactagaaggagaggaaaaaagagattggggcagaaaaatatgtttgaagaaataaaggccccaaacttctataatttggtgaaatacataaacttaccaatttcagcagctcagcaaatcccaaacaggatacactcagaagggaaaaattatgcctagacacattataatcaaactattaaaagccaaagataaataaaaaatctcaaagcagctaggaaaaaacactgaacacataagtgaataatgatttaaactgtcacagatttattataaatcataaaaataagaaatcaatgaaataatatctttaaagcactaaaggaaaatacttaatcaaaatgtgtttcaagaataaaggcaaaataaagacctcctcagatgaagagaaactaacagaattcacagccgactgttcaaaaaaaatattcaaggaagttttttaggctgaagataaatgataaaaaggaaacttttatattcaggaatgaggaaagaacaaataattgtgtaaatgtaaacgtctacttttttcctgttaagttcattaagatatatatgactattttaaagaaaagttataatattgtctgatagttttcaatgtatgcaaatgtaatacatttgacacctaaaacaaaaagattaggctgggggaaagggtcttaaatggctgccaggtttctgtattttatgtgaaatgacaccaagttaaactgcaagcaggtcatgaatggttagatatgcatacattaatattcagagcaaccagtaaaaagctaatccagagataccaccagagagtcaacaagtagattaaaatggaaattaaaaaacactaaaataatccaaaagaaggcagaaaaagaagaaaaatacaataaaatacagaagagacaaacagaaaacaaataataaaatagtagcttaaattcaatcatttccataatagtaaacacacacacacacacacacacacacacacacacacacacacacacacaccaaaggttggctttaatattagaaaagcagtagaattcacagcattaagagaataatggcagacaaaacaatcatctcaacgtatgcaaagaaagcattttttaaaaacttcgacaccattcacaacagtctcagcaaactaggagtaacaagaatgtcctcaaactgataaagtcaacgttatattaatggtaaaggatggagctgttttcccctgagatcaggagcaaggcaagtttgctaagtaacaacatgaaaaataactcgaaatgggtcaagacctaaatgtaaaacctaaaactgtaaaacttcgagaagaaaacaggagaatgtctttgcaaccttgagatagcaaggaacttttacatagaacagaaaaattacaaaacataaaagaaagattgataaattagatttcatcaaaattaaacacttttgctttttaaaagacaccattaaaaaaaaaatgaaaaggtcagccacagactggaagaaaatatgtgtaacacatttatcagatgaaggacatgtatccaacagtatgtaaagaactctcaaaactcagtcacgagacaaacagtccagtttttaaaaatgggccaggcacagtgcctcatacctgtaatcccacactttgggaggctgaggcaggtggatcacttgaggccaggagctcgaaaccatcctggccaatatggtgaaaccccacctctactataaatataaaaattatccaggcatggtggcacacacacctgtaatcccacctactcgggaggctgaggtgggagaatcacttgaacccaggaggtggaggttggagtgagccaagatcacaccactgcacttcagcctgtgtgacagaccaagactctgtctcaaaaaaaaaaaaaaaagtcaaaagatttgaacacgcactttaccaaagaagatcgggggtccccaatccccaggccacaccagtctgtggcctgttaggaaccaggccacacagaaggtgagcgacaggcaggcaaaggagcattaccacctgagctcctcctcctgtcagatcagcagcggcattaggtgcacaaaccgaattgtggactgcacgtgtgagagacctagattgggtactccttatgagaatctaatgtctgatgatctgaggtggaacagtttcatcctgacaccatcccctcctgccctgtctgtggaaaaactgtcttctgtggttctgtgaaactggtccctgatgccaaaaagtttggggaccgctgcataaaattatgctagtcattagttaatgcaaactgaagtatgagataccactacgtacttactacattgacaaaagtttagaagactgactacaccaagtgttggcaaggatgtgaagcacctggagctcacatacgctactagaggtttgtaagatggtataaccactttggacatcagtttagtagtttctcaaaaaattaaaccgtatggcctcagcattccactcctacatagttggccaagagaaacaaaaacatatttgtcaaaagacttgtacaaaaaccttgtaataactttatttataatagccaaaaataggggtagaggaagaaacccctaaatcctcatcaacaggtgcatggatagacaaattgtagtagttctatacaatggaatgctattcagcatgaaaagggatgaaaaagaatgaattattgatgtaggagacaacatgggtgaatcttacattcattatgctgagtggaaaaagtctggcaaagaaaaaagtggatgcatactgtataatcctatttagataacatactaaatcattccaaataatctattgtgacagaacgcagatcagtgttgcctgggaacagggtggaagactggattaccaagggcacaaggaaattttttgagatggaaacattcattatgttgactgtgctgatgttttcacatgtgtacgcagatgctaaaactgatgtaattgcacattttaaatatgtgcagtttattccaattacatcttgatgttataaaaaagaatctgagaagtacggaaaatgtaacttaatagaaaaagtaatgaatttataaaatccaactaatttaagttatatcccaaagcttaattcccttttatttagttagcaagaatattttaatacaatgctcagatctcttgaaacagtttttcatacctgttctgcaggtggtgcaccaagaggtagtgctagtctttaaaatgaaatgtcacactctttacaggaatagcatgaagtactggtgcactgtcttctaaactggtacattgtactctatcacaaacactaaagttttgcagcagaaaaataccctactgagggtatataacacgattaatatccaaaaacatgagatatattaaaattagtataatgccctgctttggagtttaggcttaatattcattcattacttaatcagttgtgttgttgctatttgctagtgtgttcctttagcaaatagtaagcctaagtaaaaagtattgttgaaaatcaaattgagaattttctgtgcattgatttctttcttacggacagagaaaagattgtttttattcaattatgatggcaggacactttggttgaaaatctgcaacacatggttgaaagatcacttccctgacacacggcatcccacagcagggttaaaatacttttagaaccacatcaaggggtaattgaacaagacatttatgacactgccacatgcatttaaaaggtaatgtgtctacaaccaaattgtttgcttatcataatcaacctgaattacctaggtctgatgttattttactgacaaagaatgtcagtgcctaattgtaatgagttccacaggaacctcatgaactcattcacaacaaggaatactgaataagagatctgaaattcttatgtgaaggagattccaagggaaagatgtgcatattacccacaaggcaggcacgactccatcacagctcactgagtacccactatgtataccagttaaggcaaaatagaaaacaaaataggagccctcttcccatgtccccaaaatatcccaaaatagctgtcctggggagatacggaaaaaaagtttaaactggtaccctagttataatgccttttttttatttttaaagaaaattcaagtgaagtattgtatggacaaacaagttgtctagaacatggatgctttaaaacctacaaaaacacaaaaactgcaatatacatctttctgagaaccacagaaagtgattaatagatgtggttgacttagaatgcccaaattctagactacagagattttggaagctatcaaatatttgatgtctaccataataatttttgttacctattttattttaatttaatgtacaagagacccttttgactggttgtattaatagtcattcagatttattgatgataacctatacagccttaaaacaatgttgatgttgcttttcaaggaggaaatttcccacaggctgggcatgttggctcacaactataatctcagcactttgggaggctgaggcaggaggatcatctgaggccaggagtttgagattagcctgggcaacatagtgagactccatctctacaatcaatcaatcaataagaaacttcccacagaggagcaaaagacagaaagcaagggtttcagccaccactttcttgaaaagcaactttgaatgtttaatattattacatggataatttttaaacatttcatatagctcattcagccactttagctcgagtacctgatttagcatccatttaaataatgtttttaaattaaagtaattacaaattcacaagtagttacaaaaatagtacagacaggtcccatgtaaaatcactcagcttcctcttgaaatatttacataactatagcactttaggaaaaccagaaaatcagcaaactacagttaaactattatttctttttaacatttaaagcctgagtattatacaataactgatatatatacacataaaagtgtttaacacccccatgtagccagcactctaacaagaagcagaaaattgctagcactccagaatcacctcttgagttcctgttctaacccaaatccttgagatttctaacagcacacatgaatgttgcctttattgcaattataaaaatgaaatcacgctgcctcattcattctcttgtgtctgcctccttttgttcaacacatttgcgggattcattcttattgttgcatgtagttgaagattgttcattctcattgctttacagtattccattgtatgcatatactatactttgtatgcatatactatactttacttctccattttacttattcattcaaatgataagcatttgagtagtttccagttctgagctcttatgaataatgactaagaatagctcagtacgtgtcttttggtgaacgtacttatgcatttccattgggtgtgcagtaggagcggaattgctgggtcaagggtatgtgtttgctcagctttagtggatactgctacttagttttccaaaatgattgtgttaatttacattcccatcagcaatgtgcaggagttcctttgctccataactttttctggtggatatgtaatacatgctttcaaaaagagaattatagaaataaacatcaaacaatactggtggtataagcaaagcaatcatttttctccaatattcaagattctgcccaaagtattttacaaagcaaaactacctgaaattctaaaattactcttaaaatatattcttctttaattaattaaatcacgctggtttgatgcggtattttccaaacatgctataaatacagatacttgggcatatctttttatagaactccatgagaatcttatcatcaggcaagccagtgaaacattactatatgaagacattttgacattgatatctgtctaaaagtaaatcagagtgaaaaataactactttggggatttctttggagagtcccagtcccacaacctttctgtaatattgtcaacttctataacaacttcagaggcaaacatttaaacagctgggtaaattgaggctaaagtatgtttgttgccctaggtccttccataatatcacatctctcatagggagttacatgggatagattggcttatggatatttctcatcttcaaaagaagtcagttttgactacttactggaatacaacaaagatagtctgtagttttaaaggattgctagtgttaatataggaggaagaacatgagaactggtatcaaaaaaaacttggtttcgaatccaagtgcacctatcatctatggaactcaagtcaacatatcctttctatccctatctccttctctgtgaaatagagataatatcaaccatcttatacttgactgggaaggctacaaaaattaagacaaacaaaggagatgaatacacagtaggaagtttaaaaattcgtttttttttctttgtaatctgtttttgcatcttctaggtctcttctataattgctcacctgtaagcttaaaaattattttgtaaaattttctaataacttatatattgcaattcagcttttgtaattgaggtgaataattacaggcaaaaaaaatgtctagttccacattttcattaactttcatctctgttggtagaaagcagcagtcctataacttgtgactgaaaatgattacaagcaataatttagaaaaatgtaaaaagaaggaacttgaggtcacagaaaactataattttaaaataaagttgaactcttccaaaactagagaacatcgctaagggcaatatacaagtaaattttttaaaacagtactaaaactgcttgaaaaaagccaacatttcaatttagccttttagacagctttctattatcaacatattaagtagtcaaatggcctttattctgcagatcaaaatgtttcaagcatcacattttatttgtaagaatgcctatgaaaaccacttttataaaaataaatctaattctgtgtactgaaaagaagcttaccatatttaaactatatagccatgaaaagcccatttaacatcatctgccaattactacatataaaaagtaattaagaaaggtttatattataattaagtctccttcagctctctgtgatttgattcttctaatcttaaagctggtgaaaaactctggaaaacattagcacttattttaggaaacagaattgttagacttttatttagaagaaaatttgtaagtaataatttgatgtcatatgtgtactaaaattcatcataaaaacctaagagtagggaagctgtgattaacaaatattctgccaaaaatctgtgtaatttagcgcaaatcctttaaccatttttgccttggtttcctcctctgtaacatggggataatgtcactatatacttcttggggcagctgggaggtctagatgagtgagtgctcagaacagtgcttgataccatacgtgcttggtaagtactaagcaatcattattaacgagtacaaaaagaaaatagttacaaagaatgaagaagatctatttgatagcacaacagggtcactatagtcaataacaacttaattgtatattttaaaataatgagtgtaattgaattgtttgtaacttaaaggataaatgcttgagggaatggataccacattctccatgatgtgcttatttcagcatttcatgcctgtatcaaaacaccttggccaggtgtgatggttcacgcctgtaatcccagcactttgggaggccgaggcaggtggatcacaaggtcaagagatcaagaccatcctggccaacatagtgaaaccctgtctctactaaaagtacaaaaaataagctgggtgtggtggcacgtgcctgtactcccagctacttgggaggctgtggcagaagaattgcttgaacccaagaggcagaggttgcagtgagctgagattgcgccactgcactccagcctggcaacagagtgagactccatctcaaaaaaacaaaacaaacaaaaaaaaaactcacatgccccataaatacatatacctaccatgtacccaaaaaattttaaaaacaagttaaaaattttttaaaataattttttaaaaatttaaaattatcgtaagtgtagtcataggaacactgagtagcgcagaactcacggggcactgtcacgccatagtgctgggtgtcactgatcagcagctttcgtttcagttcattcagccctactcccacgggacctgaaaaacagggtaacagaaattcattattggacaaaacaccacataaacatttctgtaactgacatgagtctctaagacagactgaaaacatggatccagctttgcatcctaagtaaagagattattttctgttaacttgaacttaagaaaatgctagatttcttttgttgcttttttactttttcaattgaaatcctcaccttttcctcaaaaaggatagaaagatttatgtttaaatgagatatgttctagagtatttaggctggatgtggtggctcatgcctgtaattccagcactttgggaggccgaggtgggcagatcacgaggtcaggagattgagaccatcctggctaacacggtgaaaccccacctctactgaaaatacaaaaaaaattagccaggcatggtggcgggtgcctgtagtcccagctactcaggaggctgaggcaggagaatggtgtgaacccgggaggcggagcttgcagtgagccgagatcgcgcctctgcactccagcctgggtgacagagtgagactcctcaaaaaaagagtatttaagtattaccaaataacaagctacccacaagagcctaaaaacatgtctacctaagaaaattcaattgcataatgcagatagtgaaaatgtcaattttaaatgtttttaagtgttaataaaacaaaacctttcaccctgactttatttgggatgcaaattcagttacgcattttacatctgctaaacaatcagccacatttacatgtgctgagaccttttcctgtactatagacttccttaagcatttgaaaacttgcctagaccttacacactttactcaatcaatgtatacacactggacatatataaggagcaaggcatacagtagattctgcggacaacaaaagatgacaaattgactctgatcttaaaggaagtcaccggttaattatgagtccgggaccagaaaaacaaaaaacaaagagcagtttcaaatatgagtctgaaatcaaaagttagacaggcataagtcccccctttccagcattgctttccacctaaaagcttctcacaatgctgccatcagggtccatttaaggatggtgtggttcagcgggtgacacaagctaccacactgccctcaggtagagtcccatctcttcccatctgctatgccctcacctggtgacactggaaggcaaagccaggggcgtaattagatttcattttatttctaaaagtgtgcctgttccttttccttcttgggcagaatgaatgagaactgagaacgcatgcacagtggctagcacagtgtccaggtacttgactgttcactgccttgcctatgtcttcttccaccctgaggaggtcacaggaggctttgaaagaataaggttttacaccatacaatggagaacatgcaggtgtaaagagaagtagggtgggcatcccaggtggagggaaaaggatgagcaaagacaaagtgggggaagttggggactgtgctgttcttgctctaatgccatttctaggtccctgacccttgtataaaaacacctgtcccgaggtggtcattcactaccaccttcaacctttctccacactgctgtccagtatcaattctctggcaactttcccttttctgtaagacagcaactctcaattctccctcttataataaatatgccataataccccatttatatcctgaaatggaattaattgctaatataacttatcgacataattctcccttccaaattaatacattgacctaactaaaaataatatatgaaaggagaaaaaataatttataataaagcaatatgtatttcaatatgtaaattcttggcatgactagagcagaaaacctaaccaagtcagatgtttgcacctacttataataaataagtttggatttaaaagatcaggagctattctgcacaagaaagaacaggaaaacaaaagcccagtggtacatgtaaatccaggaataagaactagcatttggatagaaaccacagatcagacttccttgaatatgataaggaaagaaggaaacaactaaggatagcatgtcaaggctatcgaagtgaagaaaacaatacaaatgacctgagcttacccaagagtagtatatggggcctggcgcggtggctcacacatataatcccaacactttgggaggccgaggtaggtagatcacttgaggtcaggagtttgagaccaacctggccaacatggtcaaaccttgtctctactaaaaatacaaaaattagccaggcatggtggcaggcacctgtagtcccagctactcgggaggctgaggcaggagaattgcttgaaccagggaggcggaggttgcagtaagccaagattgcaccactgcactccagcttgggcgacagagcgagactctgtctcaaaaataaaataaaataaagaatagtatgtgggatgagacagtgcttcagtgcaccagacagtttgcttttctagaaaccccaccacaggctgcatcatctcctcagtccttgaaagtctagcacagcatgttgaagtaatgtgggatgcagtcagatctttgttctatagaagggtcaagtctacatccctctacccatcagccattttgacatcaaaaaaagttccctaacaatgtccataatgcaccccagtgggcagtcctgcccctgtggaaaccactctctatgactttagtacctgacccttgtcattctctgcaccccaaatcctgccatcatcttgggtgacatcaatatccatgtagaaattgcttccaaatgcagcctctgacttcctgatctctggtgacctccctctctacttcacttcaaccatgacatggcacgcctggcctttgccatcactaggagctgattcactatgaaaatattaaatccaaattccccagtatggtatcattctctgatcttcttggatcactcactcagttattcttcccacacctatggtcatataaggacatttcacttctatgattttgttaatgtcttcatctctcttacacttgtcctttatcacacttgccaatgaaaccacccatctaagaccaacccaatggcctctctccatacccactgctgagctgagtgcagaaaacccatgcagcccctggacagcagtaacatcacgcattcctggtctccacgcataaaccaggaccttcatgtgctccagcaaccattttatgttttccttatcatctggatttcttagatccccatgatggcaatttcgacttttctccaggctcctctctacccacacctgggagcctcctggtcacttctctcttgtatatccctagaatcaaccaccaaaggctgccaatttcacctcctaaacattcttcagatctatcagatctatgcttccccattgccactgctgccacaatacccctgttttgcctcctgtcccgaaacagccttttatctgccttacatctgctgtccttccatattatctagcatcacctggcagccagaaaggtcttttcaggagttattctggtcctgttgcaaccatgcttgacattcttggatatgtagtttccagtgggtctcccaaaaaagattaaaatctttacatggagctgaggggagtgcctcacacctgtaatcccagcactttgggaggccaaggcaggtggatcatttgatatcaggagttcgagaccagcctggccaacatgtcaaaaccctgtctctattaaaaatacgaaaattagctgggcatggtggcgggttcctgtagtcccagctacttgggaggctgaggcaagagaatcgcttgaatctgagaggtggaggttgcagtgggccaagattgcatcactgcactccagcctggtgacagagtgagactgcatctcaagaaaaaaaaaatattttttttttacctagtctacaagggtctgtgtgatctgaaccctgccctgtctgcctgcaactctctcctttacttgaagctgagaggaattctgatctatccttcagagcttggctcaaacagtgcttcctccagaaagccacccctgatcctagaggatcagggttcccactttcatgttccacagcatcctgtacatctccttcataatacttaaaaatcataatcagacaactagccaaaacactgtttaatggctgtatcacccaccagatagaggcaccatgagggcaggagtattatattgtttaccatccccaccaaataaatccttaataaacatctgctgaatgaacaaataaaacatttagtgttgttatcaccacctcatgctcagcagaagacctcaactacttcagaaaacatagaggccaacacatggaaatgttttcaaagtccttcctacaaagtgatgcatctagatccacctagagcaaccttttttttttttaacttgcttatttttatttttgagacagtctcactctgcttcccaggctggagtacaatggcgtgatcatggctcactgcaacctccgcttcctgggttcaagcaattctcatgcctcaggctcttgagtagctgggattacaggtgtgcaccaccatacctggctaatttttgtaattttagtagaggcagggtttcgcaatgttggccagctggtctcaaactcctggcctcaagtgatccacccaccttggcttcccaaagcgctgggattacaggcatgaaccacaatgcccattctaaagcagcctttatccttccttccagccatatactctcacatcttctcttagagattgctctccctgaatcttcacttctcttgcttctagctcctttctatcagcacttaaaactgataaagcctctcttaccttaatacaacaagaacaacaataaaagctccacatttcccttaactctaaattcttctccagcccttaattcaacagcccttcatgtttccactttcacgggccatggtgtcttccactcttgctaatatcttcaactcttttacacactgtccttttatcacacattagtctgttctcacactgctataaagaatacctgagactgggttatttataaggaaaagaggtttaattggcccacagttccgcaggctgcctgtgaagcatgattctatcctctgcttggcttctgaggaggccttaggaaacttacagtcatgggggaaggtgaagggggagtgaggtgtctcatatggcgggagcaggaagaaggggaagaggggagtgccacacacatttaaacaaacagatcttgtgagaactcactatcacgacacagtaccaaggggaaaatctgcccccataatctaatcgcttcccaccaggccccacctccgacactggggattacatttcaacatgaaatttgggtggggacacagatccaaaccctatcacgtgccaaggaaacatcccatctaagatcaacccattggcccctctccatacccacacctgaaccacagagtgcagaaaacccacacagtagttcacccttctctccaccatcctggtttatggccccgaaacttctcaccagcacctcccacttgtcttatcctgtgtccacagtcaagtgtaaatttttttacaggtttatatagattgcacgacgcaagttactatgatctctcctcttaattcttgccactccttccttgcactgtacgctgcagcgccatgaaatttctcctgcttcctgaaacgtggccacttctccttgtgttgggtcttcatcacgtgctacttgctcttttatgcacactcctgtcttctcacctgactaattctcgcttgttgtttaagattcagctcagatgcaccttaaggaaatattctctgacactttacatttgggttaggttcccgagttcatgtgtttcctgtacttccacttccaaggaattatcacactgcattgtacttgcctgcttccttgtcttgattgtctaacagaccgtgagttctgtgaaaacaggaatgccttctgccttattcaacaacggcttccctagctggcaaattgaaggccctagttagattatttatttaaattatactcaataatgatgctattatgcaggtgaaactttgttgaatgaaccaaaggagtgtgagagaaagttaaaaagtatttgcccctagaacgtgtggatatgaaaattagataatctgctcaagttaaccaatagaagttgctggaattcacatctgaacttggctctttatcttaagataaaaggggaggtgatggattcactctaggtacagtgagtttacagaaagaaaatcttgctcccaaaactcagacaagagctgccatgtaacagagaggacagggctagggttccattgtgaatgtattcacatcaaggtaaaacctgagactgcattgacaggtgagacttctgagggaaagggcgaaagacataagtgcttattggttgtctataatatgtcaggcaccatgtaggggcttacatatttacctactttaaaggttcaaaaagtattcagagtaagttctaaaactcactttttcaaataaatagagaaaatacaaggaaaacaagtggtgttgcaatgaaggtaccttctaagtacaaataacgcaaacccaattatatatgttcccacacacatgcgcgcacacacacacacacacagaagcaaacacagcaaaacactattataaaatccaaatagaggccaggccaggcccagtggctcacgcctgtaatcccagcactttgggaggccaagacaggcggatcacctgaggtcaggagtttgagaccagcctggtcaatatggtaaaaccccatctctactaaaaatacaaaaattagctgggcatggtggcacacacctgtaatcccagctacttgggaggctgaggcaggagaattgcttgaacgtgggaggcagaggttacactgagctgagatggcgccattgcgatctagcctgggtgacagagtaagactccgtctgaaaaaaaaaaaaaaatgcaaatagagtgtcccagcctgccttgtccctcaagacaactagaactacaggaagggatgtaaattcaccatttccttagaaggtctcagctccggagtgactgctagagtgtgagatactttgccaagtgagataggtctagcacttcctttcttattcttaaaaatctctaactacaaaaaaaaaaaaaaaatcaactctctagggaaaaaaaaactaggtatatttgaattagtgggaaaaaatatgccatctctaatgtgatatccttaaattttgactatattcgattttgggcctaggtaatatgctaactttataatctaacccttacaagcaagctcacgacacccatgtagggtgccaagaacattcagaggcaaatgactttatttggaaaattttccctaaattaggttattctaggtcatcatcttcaaaggtagaagtatcctcccaagaaaggttaaaaatagagacataatttcaatcattcttactgccaaattgtccagtgggcctacaaacagcattttcccagtcaggcccttggatcaatctgccatccccactggagaagttctagagtctccccttgactttaaaagaccacagctcagatgcaccatcctgtcccgtatcctctttctagggttaggcctaagttcacaacatttttagttgtctggtttgtatttggaatacaaaatctatttacattccaagcaatttagggatgcaaactgagttaggtttattcatacgcctctgcaataggatagcttcatttaccccttcgataaagaaatttttatcacaattggtgaaatacacttacacgggcacatataagtagattactctgtagttcgttttcagctgagcttgctaatgataaagcgaagaagagaacagaatctaaacagcccatctttaaatcatagacaacaggctgtggcataattatgatgatgacatagtgagttctttttacatgacaggcatgtgtgacatggttcacatacactgttactcatcctcagaacatccctgcaagaaaggtatcattatcctcattttacagatgagaacactgagacaatgaaaggtgaggtaatttcccaaaggtcacacatctggcatgtggcttagctggtgctcaaaagcctgtctgtctaactcaaaagtctgcattctttccactctacctatgatcttatgaaaagaatatgccaataaaacatgaactcgggtagctgttgctctgctgtctgtttatggctgtgaattggaacttcacggactctctcatccccagtccacgcaatccatacttcgtgatgactaattatgctccaggaataggcagagattcaggctacaaaaagtggcagaagtcaaatctggtgatctcaaagctcactctgtgcagaatctctgagaagtctaatataaactgaatgaggatgatgtgcagaccaggcctgggccacagacactgggcatatgtgttggattctcaattcaggactgaggaaaatcaaacacaaagatgatatatgtaagtaaaagccaaaaaggcacattaaaaatgattttggagcttattaatctggaattcaggcagtaaactaaagttggtgtgtctcttagctttgaaaagaatgtttatagccaaaccagaaatgtaagtaagtatttatctgcttcatctaaaaaatatttcataagaatttataaaaccatgttggaaaggaagaataaagctgtgtgtatcaatttgtattacgtgaaggtcttgggaaaaatgtgtgtcaattggataattaagataattagaaaagcataatactactttaaattcctttttatgcatttaattagtaactccttattgaaagtaagcaaatgtgttgcatggttttataaaaagtttcattcattttaaccaaagttacgtagcccatttaaggtgtcgataaaatgttaatacaatttctatttaagattttaaatttaagaaaacagtcactgttaactacatgcaaagattcttttatgtttatcttaaaaaggttaaaaatctatagcaaattctcagctttaatttacatagaagaaggtagacatacatgacaccttttccccaaatgatcttgaaattggttgacattattgcctcatttcatgtaatgtaattatgagacgtagggtattttcattgttctgtttcagattttctttgtattccccaaatatgtttaggtgtttatgatttgtaacaaatgtttatgtataaaaaacaaaaagtatattttgattagaatgctagcacagtatactttcaaaattaattcacagttgatgcatacaagtttttcattctgtaaacatggtctccccaaataatctacttttttaaatctgatacagacatataccacaaaaaaaaaaagaaagaaacaagccaggtgcagcagtttgcacctgtaatcccagttacttgggaggctgagacaggaagatcacctgagaccaggagtttgagtccagcctgggcaacatagcaagatcctctctaaaaaacaaaacaaaaacaaacaaaaaataaaacaaagctaaatgagtagaaaaagatttcaggcaataacatcagcgcctagaagcgcacccaaaaccatacatgcactgaaagaatgatttgaaataccaggtataatgttcttatactgacaaaaaaacaaaaaacctgttaatggccatggtctcaggcgttgtgttttgaaccttcaattctgtacttatttacatgttagtgcacattctgagcgaatgaataaacatttacttgaacagcaatatgtattactattgtgaaaataattactgaaatcaatgaaatgtggcacatgtgtatattttaaatgacagtcataaagaataagcatatggatgggcataatcctatcacttaggaaggccgaggcgggcgcatcacctgaggtcaggagttccagaccagcctggccaacatggtgaaactccatctctactaaaaatttaaaaattagccaggtgtggtgcggggtgcctataatcccagcggaagaatggctcaaacccagaaggcagaggttgcagtgagccaagattgggagggggagggggagggagggagaggggaggggaaaaggaaaggaaaggaaagaaaaagaaaagaaagaagagaaaagaaaagaaggaaggaaggaaaacaaaagaaaagtaaaaagtgggaagcttattgaaagagcaccattttttccaggcagctatttactctacgcttatatagactgactaaaatactcatctcactctacttcaaaactatgacaagagtgcaataaaattaagaggtcaaaataaaatcatccctgagtgttccgtggctaagtagacgggggcatgagaaactgccttacttcagagtttgctcagaatggggccaccaagctcccaattcaaaatctatcctgtctgtgtccccaactctccattccccttatcccattccactttactttcttccatagacttatcgccttctaacaactgtacaagtgattttatcatttcttactaatttattataaatatggttttggtccatcttctcccattagaacataaatggcacaagggcaaaaatgtttgtgtgctcagaacagtgcctggcatagctggtacaccgtaaaactcagttgaatgaacagatttgtggtttatgcccagaaatgaagtctgaaaataaatatttaagattggccaacggcataaaaagccaactgtgactccagtgaagatcacatttaccttttacatacaagggttataattttaaatccatcacattctcaggaatttcattatgactttcagttttacagttatctatataaaatcctccagagccaactctaattctacaagccttccatcaaagtgcaacaaaagatatgagaattctaataaacacactaacacatttagttttgagcacttactttgcactctgctttatgtgggaggctttgtgttatgccacagttttatgaaaaaatagtgacagtcttataataaatgcctgtttattcaaattacctctgcaagcagtctttgggcagcacataagattcagcacaaaggagagcagaatagtactgatgctcaagctaaaaatgtgaaatatacagaaagatttattattagtttctcttgtacctcccagccagacagaacaagtcgcaaattgtctgaatatccacaagatgaatttttgctcttgttttggcttaaacgtgaaaagtgttttagttgctttttaacacctaagtcttctccctgctccctccctcacccacacacacattatttgactttattactttacttttcaaaaagttgggtttcactgaagataagacttgtcatgtaggaaaatgtattaaaagcctgacatttggtttcaacatactttctagaaaatgcttttaaatgcagaaggaaatttaacagaaactgtcattgagatgttttggtggctaaaatgaggcttaagaagaatacattttcaaaatgaagagaaaattataatacttctgatcacagctcaaagtcctccattattgtatttttgccatggtaacaacttggtctattattatttcttgatcattaaatataagaataaaaaccatatagcattatgataatatagaaaaataatattttgtattttctcaacaatatttatgaaacggtttcaaagcaagtgtcacttttcccaatggctttggaaacactgggcaaaaaattattctcttttttttttttttgagacagagtcttgctctgtcactcagtggcacagtctcggctcagtgcaacctccaactcccaggttcaagtgattctcctgcctcagactcctaaatacctgggactacaggtgactgccaacacatctggctaatttttgtatttttagtagagacgggtttcaccatgttggccaggctggtcttgaattcctgacctcaggtgatccacctgcctcagcctcccaaaaagtgctgggattacaggcatgagccactgcacccagccagaaattatttccaaggaggactatgacacttatactttttccatcttcctacataaatacacattgtaggagccaaggaaataaattcctatgtatacaacgtttctataatcataaactaaacagtaaacagttaattcaggaataacccagaatttccaaaatttgtgtccatggcttcattacctatttcagatgataaacttctagataatctaataagtgttttaacactgaggttcaaaaccagtagaagcctactgatatttgaacatttcatgtttatcttattatgtttagttaatatgtaagtcctcctcctcctcttccttcttcttccccttcttctccttctcctcctcctccttctctccttctcctccttcctcctccttccttatccttcctcctcctcctccttcttcttttagactctgttgcccagcccagaatgtgcagtggtataaccacagctctctgtaatctctaattcactgactcatgcaatcctctcatctcagcttcccaagtagctgggactacaggcacacaccaccttgcctggctaattttattttattttgttttgttttttataaagatggagtctcactatgttgcccagactgggcttgaactcctggcctccagcactctccctgcctcagcctccctcagcgctgggaattcaggtgtgagtcactgcgctcagtctctttttttatttttagagacgaggtttcactgtatctagctggtcttgagctcctgggctcaagtgatccttctgcctcagtctcccgaacagctgagaccacaggcatgcaccactatgctgggcaataaatatttcttattaaaaccatactaggtgcatgaattggcctgcatctttgcacagattattttgtttaaccctcaaaacaaacctagaaagtaggtgtttttattatctcaaattttcagatgaataactgaagcccagagaaaatttgaattgttcccgtgtcatgtgactactgaagggcatcacaggactggaaggcagccatcttgtcccagaggctcatctctcatcttctatattatcctgcctcacaggatataaagagatggggatttctccacgtaacaggctctaagcttctgatacttccaatgtgccatacacataagctgaaagggtttctgagtaaggaatacaaagaagaaagcaaataatagggaatacttctgaaggacagttacataaaaccgccttggccatcaccagatcccactgtacagtgtcgtgctgtacacaggccacagtggggtagaggtggaatgttctgttaatgacaccagggggctgaaatttccaagcctccagctgtacaggcattcttgattctggaaagtttctagatcttttctttagtagaactattactaagaagtttgcattaatataccatgcttacatgattttcttcctcttttttttttttttttttttttgagatggagcttcgctcttgttccccaagctgaagtgcactggcatgatctcagctcaccgcaacctctgcctcctgggttcaagtgagtctcctgcctcagcctcccgagtagctgggattacaggcgcccgacaccacacctggctaatttttgtatttttagtagagacagggtttcaccatgttggccaggctggtctcgaactcctgacctcaagtgatctgcctgcctcggcctcccagagtgctgggattacaggcatcagccaccgcacctggcctttactctattttttatatagagacacaggaaatacaattcgcctgaagagaaaatgtgatctaacatgacaaaaagaataaaatgaatattctccattaagtctgttctgttataatccaattgtcacagatttaagaaatactgccttataccagcaattgctccaaaataggaaaagaacgtgttaggggctaaagagtttcacataaagttaattttcctagaggaatttcagactaaaggctaataatcataacaaatctgttgatcaaaacagacaagccaaaacctgaaatattgctgagcaaatcctgaacagcagaaagattaagaggaaaccaaaagtttctaagccatcattataaggcatacatgagaaagcacaaaactgaaatacaatgccaagaaaagtagaaaatcaaaataaatggcagccaattcacaatcactaaccaaagaaggcaatggcaactgaacccattcaaacagagcaacaaggcttctccctgtgtgcacagcaccagacctcacagcatctgcatctgaaccagcagcaataggggaaaagcaaaatgtaccctaattaatcaggccagcagcaacagcatcatctgggagcttgttagaaatgcaggctctctgaccccacctcaggctaccagattagaaactgcatcttaacaagacctccaggtgaccagaatgcatgttaaatctgacaagccctggaatagggtctggaggtcagaggagaagggcaggagctcctccctctgtatattctccaagactacctctatctatggcaatcaaaaaactattgagagacaatctctgaactctgaaggcagtagacagattatgaatataacctttcgtggtaagtggaagacttatcccaggttgaccatgggaaatgtgaacaaatttgagagggaaagaccaggaaaatcagcactttaggaatttattgaaaaattttaaggagcagggcagtgaaatagtaatgacaggtgcagtaagaaaccctgcctagacagtgtgcagaattagcgtgtaggaaagagagaggtgagcccaccaagcctattgaactgacctagggagacctacattggaaactcaagttgtagacgtgggcaggattcaagtgaacataaacgctttcactagactcacatctaaactttcacaaagcaaggaggtatctgtcaggaaaatgaatgaacagtcctttaatcaaggagattttttaaaaagtaagatatttagatccagcacagtgtcaagtactgccctaattttaagattggaagccatattctacagtaagataagaagtagggttctggtgtccacctgctggggtctgaatcggttctgtaacttaatgcttcaggatcttagacaagttacctacttctctctgtgcttcagtttcttcatctgtaaaacagggaataataagagtatttaccatgtagtcatgatgaggactgaaggaatacactcatagctcttagttactgttattatatagcatggaggaaggacaggaccctcttaaaaacaagttaaaatttaaaaacttgcttgagactgtttgaaaggagttgggaacagcagagggtagtgaaacatgacagttagatcttagtagcagagaaacctaagaagttcaaacagatattttggttgtcattgaagcaatgcaattaattatttacttaaggcctggaaatctatagagaatgaggaaacactcattggcagaagcacctatcaaaggcaatataaacgttcactgactgtgccacttgggagcatcagtatttagcatctccagtttaggactatgtcgagggaatatccctgttggaagacaaaggggaaatctctgagaatcaggaatcaaacttaaggaatttcaaacaggagacagaaacagcagtcattgcaataggattgatatcacagggctagaaaaaaaaggctttaggattctgctgggaattaaaaaataaagtgagaaaagggaggggaccaacccaaatacccatcaataatacactggataaagacaatgtggcacatatacaccatggaatactatgcagccataaaaaaggatgagttcatgtcctttgcagagacatggatgaagttggaaaccatcattctcagcaaactaacacaggaacagaaaaccaaacaccgcatgttctcacttataagtggaagttgaacaatgagaacacatggacacagagaggggaacatcacacatcagggcctgcggggtgggggcaaggggagggagagcattaggacaaatacctaatacatgcagggcttaaaacctagatgacgggttgatgggtgcagcaaaccaccatatggcacatgtatacctatgtaacaaacctgcatattctgtacatgtatcccagaatttaaaggaaagtaaagaaagaaagaagagaaaacaatgaaagaaaaaaagcaaagcacttggccccaaaacagagtccacattcaattcagaattcgggtaccaggaacccaaaggccaaaggggaaacagggcaactgaagtgcatacaattaatctctttactgatgatttcagccagatgaattttagtgcaatcagtgatcacggatcaggacaattagcattcagacaggagaagcgaaaatacctcaggtcattctatgatttttggctgacaatagaatgtggtgatatataattctgggagcattattttgcctcaaaaggtagctggaatgatgctgtgatattcttttgtcctgacgaccgtttcaactgctgaccagtagggctggggttccattacacagttttgaggaggctgattaaggcacacccatgaagaaaggccaagttgtgtcagaggagtttaaagcttcagagagttccagatccactatatcggggaaagcccaccagagtctatcccccgctgaatacagcccaaacctctggacagcgcacaaaaggcaacaacctagggactctgaaaggcaaacaaaaccaggcagagtgtagatggagtcaaatctggagaggtggcctccaagataatgaagtttcccattttatttttccctctagctatagtctcgatgtttgtccccccaaattgcgtgttgaaatttgatcccagcattggaagtggggcccaaggagaggtgtttgggtcataagagcagatccctcatgaatagattaatgccctccctggcgtgaggcagtgagtgagttttcactctatttgtcccccaagaaagctggttgttaaaaacagcctgacatcccaccactcctgcttcctctctctccacgtgatctctgcacacacaggattcccttcgccttccacaagtcaaagcagcatgaggccctcgccagatgcccaaacttccagctattagaaccatcagccaaacaaatcatttttctttatgaattacccaatctcaggtattcctttacagcaacacacaacagactaacacatgcctttttttttctttctttctttttttaattagagaatcttgctctgttgccccggctggagtaccgtgatgcaatctcagctcactgcaacctctgcctcccaggttcaagcaattcttgtgcctcagcttcccaagaagctgggactacaggcgcctgccactacacctgactaatttttatactattagtagagacagggtcttgccatgttgggcaggctggtcttgaactcctgacctcaagtgatcctcctggcttagcctcccaaagcgctgggattacaggcatgagccactgcgcccagcctcaatgccattttattacatgtctttccccttggctgaggagaagaggcaacagggacagaagagatgttgctgtgatctgtgctggtgaaggaggcagcacagaagggacagtgaggtgggagaggagcaggaggtctcaggtagccccattgagctgggaaatgcatgttctctcagcacacctctataaggatgagaagcagggcactgtaagctataaataaattcttcctcctcctccttgaggaggctcagtataaatgaattaggagatgtggacattattaataaaggaaattttgaatttcttttgaagtatgtgaatatgtgtttcaaaataatgcaaacaatcttaatatgtaatgatgctagtgttcacttccaggacctacagatgtgagaaattgcatcatttcccatgagtcacccaccatttctcaatgaacagcatgggttgtaacctttcaaaggactccatcttactaagatggggtaattctcaggttctccattgattctcatttccataagtatcatcacgagtttataaaagaacaattaacaagagtgatatggtttggctctgtgtccccacccaagtctcatgttgaactgtaattctcaatgctgggggagggacctggtgggaggtagctagatcacagaggtagatttctcccatgatattcccacgataatgagttctcaggagatctgatggtttaaaagtatgtggcacgtcccctgtcgctctcactctctctctcccctgctgccatgtgaagcccgctcctgtttccccttcaccttctgccatgcttgttaagtttcctgagggctcccagtcatgcttcctatatagcctgtggaactgtgagtcaattaaacctcttttcttcataaattacccagtctcaggtaattatagcagtgtgagaatgtactaacactaagagacaccatgctcttctactccaaaacttttctaaaatcattggctttgatcctggaagtttaaatatctctcgctacatttttaaagaaatgcattgaggatgaagtgaagatacatggagcttgtggctactcacatctgtgaagggtgcacaagatagatgctaggatgcaaatctgagtcaaggcaatcgatgtttgtgaaaatacccacattcctttattaactgcctttttattttgagacagagtctcgctctgtcacccaggctggagtgcagtggcgcgatcttggctcactgcaacctccacctcccaggttcaagggattcttctgcctcagcctcctgagtagctcggactacaggactgtgctaccacgcctggctaatttttgtatttttgtagagatggggcttcaatgtagagatggggcttcactgtagagatggggcttcaccatgatggccaggctggtctcaaactcctgacctcaagtgatcctcccaccctggcctcccaaagtgctgggattaaaggtgtgagccacggcacccagccaattatcaactttaaagcgactttgctgactctctagcttgaaatatcctagaactctgctgtaatactttatttcactgaaggtctaaatgccatctgaagcttgtaccatgctgctgcctcaaaatgctttgaaacgaacttgcattgtgttcaaaaatattcacttctattatttaattgccctgatgtatgcttcatatattacaacagtgtttgctatccccacttgacaaaggttccactaaaacgacagtaccgttcttcagaaatgtcttaaaagtctctgcaagtcaattacgtacaaaaaactaaagattttgtttcagagacaagacaaaaggtgttgaaggggaggagatttttagcttgaaaacttcaagtatgattcactttgaagagaaattcttactagctcactcatttcctcagaattactcacagaaacaagcacttaccaaccaagacaacgagtctgtatttttcattagtttgtcgccgatacggtgtcacttcttcgtatgtgggtacgtcagctgtgtcgtactgatcactcttcttgcattcatacatggatttatttgttttcttatcttttctactaagacgaaaactttttctaaaaccagctgcaaatattaaaataaatatatttttagtaacatcaaccaaaaaagaaaccctcaaaaaaaaaaaaccctcagagttgggttggattttatttaccataatattgggtttttaaagttaaaaccctaatgttttagagacagggtctcactctgttgcccaacctggagagcagtggcgccatcacagcttactgcagtgttgaactcctgggctcaagcgatcctcccacctcaggctcccaggcaggtgggattacaggcacacatcaccacggctggttaatttttaaaatactttgtagagacagggtcttgctacgttgcccaggctggtttgaactgctggcctcaagcaatccccccagtttagcttcccaaagtgttgggattacaggcatgagccactgtgcctggcctattcatcataatattgttagaaatgcattcagtaagaaaaaaataatagtacacaattttataaaaacaataacttagatttaatatttatttatgtagttataataatgtaaattttatttggtttaaacaataaagagctctgttgaaaaatcattgagtaaaataactataataaagcaaaataagtcaaaaatcataatttatcaagaactgattggtaaacacatttgatatgaaaaagttaaaaacactgtaaaagcattttaaatgtaaacaataagttctctcattcatgaacatgaacaaagtttctattacatcctaagcataacctcacaacgtacccatggcacaggcagcatctattgttaaacaaaaagaaaactaaattagggagtgtgtagtgtagcgtgtgcttatgcgtcagtcaggctgacagaacaaagctcacccagtcaacaattagttgatcttcagcaagtcagttaactttaactggactccaggggatggaataaatcatcaagcctcaggttcttttctctaatggaaattctatgctttcataatgtgacacatatgaaattaagaaatagagccagccacggtggctcatgcctataatcccagcactttgggaagccaaggaaggagggcagatcgcttgagcccaggagtttaagaccaggtggggcaacatggagaaaccccatctctactaaaaatacaaaaaaattagctaagtggtggtgcacacatgtaatctcagctactcgggaggctgagacaggagaatcgcttgaactcaggagacagaggttgcagtgagccaagatcgcaccaccgtactctagcctaggtgacagagtaagactccatttcaaaaacaaaacaaaacaaaaaaacccttatatatattttatatcagctgcaaagttcaaaataaaatgcaagtacattttaaaggtataaaaatacattctcttcaaaaagaatattcatcaactttgataaacagataactttttttttttttttttgagatggagttttgctcttgttgtccaggctagagtgcaatggcatgatctcggctcattgcaacctccgcctcctgggttgaagtgattcccctgcctcagcttcccgagtagctgggattacaggcgcatgccatcacgcccggctaacttttgtatttttagtagagacggggtttcaccacattggccaggctcatctcaaacttctgacctcaggtaatccgcccttctcagcctcccaaagtgctgggattacaggcgtgagccaccatgaccagccatagatatcttttttataaacagaggtattttgtaacaaaatgaaaaaaatgtaataactaatctgtgtggattttagtgaatatagtcagctgtctgaatctgtgggttccatccatgtggatttaaccaattatggactgaaattttttaactgtatctctattgaacatgtattgagtgttatttcatctgtattgagacttttgtccttgtcattattccctaaacaatagagtataataatttacatagcatttacattgtattaggtattacaagtaatctggagatgatttaaagtatacaggaggatgtgcatagattacatgcaagtacacattttatatcggggcttgagcatctgcagattttggtatccaagggggtcttggaaccaatctcccatggatatcataggatgactgcatgaaggaaatgaataattgttaccattgggtttaagaaattaacaggattcaaaataaaggaaatgtgaaacaattaccaatgactaacaatggttttatgtgactcaccttatggattcagagtttgataaaaattgatcaagatattaaggacagagtgactaaagtttatctgataacatgtttctgtggccctctaagagtcactccgattttgagaagatatttgagttgagagaaaaggttatttataaaggatctaaaacaaggaagacagttgttctaaagctcctttacaaaggtaaagaggagaagagaataggacaagttgtaaacacatgggtgtcttataagacaagagatgacatctgaggaaagctagaaggtaaatacatccctctggccctaggatgagaaaaagaggtggaattataaaatcacacatgcagagaggattcaaacttctatgtaaagcgccagagaaaaagttatttattactttttgttcatcttgttttctaggttgtagggaaagcttcatagaacccagaaaagggacctttttttttttttgagacagggactggctctgttgcccaggctggagtgcagtggcaggatctcggctctctgaatcctctgcctcccaggctcaagccatcttcccacctcagccccctgagtagctgggaccacaggcatgtgccaccacacctggctcaattttttttttttttttttttgaagagataaggtttcgccatgttgcccaggttggtcttgaagccctgagcaaaaatgatccgcccacctcagcctccaaaagtgctgggattataggcatgagacactgaacccagccaccttcctatcacagacataacacactacaccagaagtagccaaggtctttacaactaccccttgtgcttgagcacagtggttctcagacaagggtctctttctaattgcagaatttagttatcccaaaccaaccccagcacctactctgtcacggatgtgtgctggcccagactgtagcccagtattagcacggcttctggtttagaacaaagatgatacatgagctactctaacaacaaaagttagaatgctgatatttcacagcattctaatttcatgtttccacagctcttgcctcatgagaggcaattacagaataagcaggtagaactataaattcctttataattattccctgtatggagggaggcttgctgtcaagtctctacaaacttttggcacaggaatggatataacaagaacataaatgcttcatccacaggaaataacatccaaaagtaaaaacctgacaaatttctgatgagcaaatcacagctaaatcttgaatttcaatgtgcttacctaattgagcctttaaaattcacttaagtttttactttcctttttttttttttttttcttgagacagggtctcacttctgtggctcaggctggagtgcagtggtgcaatctcagctcactgcagcctctgcctcccaggttcaagcgattctcatgcctcagcctcctgagtagctgggactacagacgcctgccaccacacctagctaatttttgtatttttagtagagatggggtttctccatgttggccaggctggtctcgaactcctgacctcaggagatccacccgccttggcctcccaaagtgctgggattacaggcatgagccaccacacccagccaagtttttactttcatcataaacaatgaagagttagtgaggaaaagagaaggtaatcagatctcttaaggtgatgttgcatgagtgtcaaagatggggaccatgttgcatagatagttgggtgatgtcagttgtgcaaggcttgctacagaacagttgcttgataaacgtttactgaatggaagtaattttaaaaggcagcaacaaaaaccctactattattcctgtttcatctgcttcatgtaaatttcaacaaagaaagcatgacacattaggcattttctaagagttaaaattctaaaaggtgtcaaaggctaacgctctgcaaacaagaaagccttagagctggaagaaactctggaggtcatctgagtctgctccccgcggggcagccatacgctgcacttgttcacatcggtttttcagtagcaacagcaatcaattcacacaggttatgaagcttcagtgccttaatgcacaggaattcacacaggttatgaagctttagtgccttgaacgatattttacaatgcaaaggagcaaaggcagtgaggtcgcaacaggggttccatgggagcagctggtcactgattgttaccaagcagaggctggcagaggatccggaccagtacctaggctctgctgacttacttctccacaaggctcatttcctctactttaaaatacagattatagtagtagctgcctcacaaggtggttaaggattaaataattcatgtaaagctttcggtcccatctgtggcatatggtaagtgctttacatgttagctacagattcatgctgcaatgcctccaactacttaaaagaaccttgaaggcaggaacatgtatcccttgtagtcccatagcatggtgtctagcaaaaataaaaaaaagcggggtgaggagggggagttaagaggctcactaattagtttcaaattgactaatagtataaaacagataaaatgttaaaattaaagccagatttaaatatgttaaatattgtagatgcctaaagtaccttattaagtattaagacattttaaatacaacagaaatagccagatgtggtggcacatgcctataatcccagctacttgggaggctgaggcacgagaatcacttgaatccaggaggtggaggttgcagtgagccaacattccgccactgcactccagcctgggcaacagagcaagaccttatctctaaataaataaataaataagtttaaaaaatacaacagaaaggtttagtatgtattaactattttttcatttgtcttcatagattctctttctagggatatagttatttgttaccatatttacattgaaagaaagtatcctttcctttggtcttactttttacttactcccctgattcacaaatacatattaatgctcatatttacatacacacatatctgatatacatacacacatatgcatatatatatatatatatatatatatatacagaaacatatatacatgtacagacatatatatgtatacacatgcacagacagggtgaaaagaaggaaaaattgccagcccagacaaccaataaaatagccagaacaaaagatacagcaagagttatgaaattcagagtatttatttgtgatgatttttcagcctgccccatactcctaacggcaatttttctagattctgtcccccatgggtagtcagaggtgatagcacacttcacatgtccttcaaggcagtacagaggctgtaattttccaatttcagtaaaataatgagcgatgtgtcagtacaccttagttaagtctaagcttaagggagagtaattctgtgtcagaaaaagggagttaatcgtttcttgccttcagatcttacttctcgtattaaaaggaagaccaaaaaatgtgaccttaaactgaaagtacacagaggattcttttagataaatgtgaacctgtttgatttcagttcactttcagtgcaaaagttttagcaagagctggcttttaaaaagacggaagggaaaggggtacattaacaaggaatttagagtaagggaacagttttacataaaaaatatttttccttacatttcatgtttttgcaatttataattggctcaacatttttatggacaggctttttccagggagcttacccacagctgctagagatttgtgtttttgaaaggaacggcacgtttagtttattacaataggaaagtgacttcagagttaagactgcagctgcaggtcagtccctaatcacagacaccgcttatctaatattttccagtagaaaatttatgatgacttgttcatttatcatttaatttatagctttggtgaaagttaaaaatttaactgtaaagggagagatctgagttgctcgttatttgcttcttagttcaataagactgcaataaacatccctttatcccatgtcactgatgacttcattagggcaaattgctagaaactagacagatcctgtccaaatgcttctcggattgattaatatcaatatccattcccaccagcagtatgtacagtggcccatttcaccattctctcatcaaaggacttctaatctcttctttaaaatcttcagtgatttgacaagtgaaaactgtacatcactgttattttaacggttagtggagttgagggtatttttttcatgtttattactcacttgcatttcttacttctgtaaattgttggtttataaattttgatcacttttggagtagagtcttcataaatacatatacataggtatctttcaataaggtcacgagccctttgttctatttgttaaaaagatgtaaggttttcaattttccttttaactgtcatcataaagaaatttaaactgtttacgtgtttgaatttataaatatctttcctttgtgattccttccattgtttctataacttttccatcttagttctgataaatattcaccaatattttctgaagtgttaaaaagtgggttgcacagctttacacttaattttttaattccatctggaattactgacatgtaatcatgatgaaatcaggcctgggaagtgtggctgtaactttatatttttctaaataactaaccaatggtctcagaaatactgaacaacccttttactactttatgttgacatatacattgtattgaaataccagatggtacattattatgccatgacagaaaaaggtgattcttggtctaaatttagcttctctttttatttttatttatttactattttgagaaagagtctcattctgtcatccaggctgaagtaaagtggtgcgatcacggctcagtgtagcctcaaacccctgggctccagcgatcctcccacctcagcctcccaagcagctggacatacaggcacacgccaacacacctagttacttttcaaaaactgtattttgtagagatggagactcaccaggttgcacaggctaacctcaaactcctggccccacttcagcctcccaaagtactaggtttacaggcatgagccaccatacctcgcctttcattctctttttaataatatcaataaattctctttttaataataatatcaaataataataataatatcagtataagtggtggtagtggttgatatttgtcgggcacatgttagatgactggcactactcaaagcactttatgtgtgatgaatttatttaattctcacagcaaccctatgaggtgggtataacaatccatgtgtttaagtacactcttcagtgtaatcaacaaagatggccaaagctttggttcaagtattaaatgataaaatgaagtcaagaagaaagtttcagacattaccctatatacatagatgcataatagaaaaaaaatgaatttagttcatttctattacattatgttaggtatgaaataatttaatagaaaaaattaacaaaggaccaacggtttaacttagggattaaaaacataattttttcctgatagaagacgttttccaaataaggaaataaggaaacacattttaacactcccctgtattagaaatacaaaaatatgtaaggcagtgtcattggctcccaaccactaggggacaaaaaacttattctcaaatgcttgtaatttaaggtgttttcacaatgcaggaccatgactagaaaataaagactttttgcaagtattccagtcactccaatttctcttaagtaaaaaattttaaaacttggacagttgcaatttggtcactttcaaagctatttctcgacattgcatttgtaaaacattattcaccaatacagtattaaccttaatgcttacatacataaattaagaatcatttgttattaaaataagtttcatattatagataaatattataactacctatactataatttcaaatgttagcaatattttttaacaattaaaaaacttggaagtaaccaagatatgcagaagtatggaaatgatcaattaacttataaaacaccttctcaaagaaatgaagttgaaactattaaaattataaaactacatagtaccatagaaatgcatttcatacaataaatgggaaaaaaaagacaggatacaatcatcatacttacactatgagttttactttttttagtaatataaagactgttatggatacagaaatatagaagaaaatatgttttttaaaaagacaatggttgtgttaggtagagagggctgtggacaattacttgttctatttttcaaacttactgtaatattatatatgtttcaaaattactagattatataattatataaaattacataatttcaaatttataattttaaaaagaaaacataaaaatatatgaaccaacaacaaatgaaatgaacaaacaaatgaaatccgtattggcagatgtagttgtgtggttatatcagcacgtaacacaaaatacatattggttatgtctcagaggcaagttctaatcatctatatttttcagtgattatggtaatagaccaaatttgtatattaacaatagttaggaatagccacataaattcaagcataaagcaagcaacaaaagcaaaaatcatggaaaagtataaaaaataagaatataatataagaagttaagaataagggcaaggaagagagagaaccagaagtctcacctaagtagtaacgatgaaaaaaagaagtacttacagtttcgaaacttacaaccaaactaataaaatggataaaaatcctttctaaaataacaaattattatattctttggctctcacaaacacataatttcaatgtaaacttataatgtacctatatttgtaattttaatgatctcactttttaataaaatattgacctttaagatggcattttattaaaaatacatgatcattttagctacaaacatggccattaacataaaaggccctcaagcaaagtcaagataactcaccacccatactaacagcctccaaaaaatcgcacatgtaaatgagggggaagtgggacttggctttctgttaactcaaagaaaatcaatactactacgttaccacctgtaatttttcaaatgggacagtttagatctttgattatatttcttttacataaccaacctggtctaataacatcagatagtatgcatttctaatgttaaaaataagcttttaatatgtttaaattttatatgtgttgatagcatgggaaaagaggtcctagtgaaatagtcttgactcataacagaggattagagaaggagccactctaaagttcctaaggtttaggccgggtgtggtggctcacgcctgtaatcccaaccctctgggaggccgaggcgggtggatcacctgaggtcgggagttcgaggctagcctgaccaacatggagaaaccccgtctctactaaaaatacaaaaaaatcagccggatgtggtggtgcatgcctgtaatcccagctactcgggaggctgaggcaggagaatcacttgaacccaggaggcagaggttgtggtgagccaagatcgtgccattgcactccagcctgggcaacaagagtgaaactccatctcccaaaaaaaaaaataaataaaaaataaagttcctaaggttttaaggaatacatttgtttgatacaaacagtctagaaaactgcttcattttttcaacggagaaaaaaaaacatttaaattctttttttctcaccttaaaattactaaaatgcatatttttttaatcagaagattttttaaaatcattgtatgagttattttttgcatcttaaaaatcggattcatttgaccaagcaaatatttaactgattcaataggtaccttaactacaaggaaaaaaaaaatttactataagtgaacttcttaagaagattaaaaaaaaaaaaaacacgtagacattaataaaaactaagcagctggaaattattatatgatattaggtttctgacaaccaaacattgaacatttctactaataaaaacattttgaatataatgccaatgctgttataatagtgcaaatcataaccaacatagtaacatgatcttaatagaaaattattatctaaatgatgctctcattatatgccaatcataaaattatcccaaagactatggaggataattaagaacatcttacagtaacaaacaagtaaaaatcttgggaggaggtttaaactgagaagaaatgctaaatctagatttactgaagtctaaaggggctaggttagtcagcttccgtattgatcttacaaaacaatgtcagaaaaaaatcaccaaagaaaaatgaacattttcatggattatattagccaattatacacatgctaattttgtagataaaggggaaaaaggctttcaaacatactattagaaaattcatctctgcaatgttgcaggttcaaagttgctctcagtaaaatgtaaagaaatgttcacatgccataaacacccttgagtctttcagctcatctcaggctaaaaataaaaatagaaactcaaagtacctaatgaaaccacaaaagttaataaaagatatcaatttgcaattttcaaagaaaaatattacttaggtctttaaaagttttcctgataccacttacaattcgtttttaaagtacagcacagaacatcaccataaaaatggagagagagagaagaaaccatatgagaatttaattttttgtaagccggctaataaagaaataagctcttacttataccttcaaaattatgagaaaatacagttatgcatatgtaaaattgtatataaaaatatggttctgaacagagagaaaaactgatttgaaattttaatatgttttctcagttgagtctgtgcaacttaaaattctccaaacacaaatggtttctttctgtcagaaaaaaatatttccaagtagtattccagacatgctgagattatgcagcgttctttcatattcaagaaagaacctgtgtcacttctgaaagaatacctctaagtgttccctatgcataaatataatgtttaggaaaaatattaaggcagtatatttagacatagctgtacttaatttgcatgacattctttaataaaatgattgaatattgaataaatggaatatttactggatttataaaacatgcagataacttgttgaagatcagtgttgcttcaacataggaggacagacagaaataagaaacagattaggaaaaaacacctaggagtagatgtgggtaaataataacatttgaaagaaataacaacaaatggacagtttcatttttatttaactttatggcaaacccctcttaacttacattaagtccccaaactgatcttgttttaaaagaatgtatgaagtactccagagcaagggaaaagtagagaaagagtgacttttcaggaaattatttgtaagaaagtatgttagaaaagagatgcatggtaagtgatgctttgtgaattgattagaacaagttttctataatgaattaaccagaggaaaacagtctgtaaatctgaccaatgttacaaaagaaattactcttcatatggattattttgtactgcagtaggaaaaaggagaatttttaatgctgatggttcgaccatcgagaagcaattatactttggaagcaaacatactgttctgaaagaccaaaaataaactaacttctatgccatccaccaaagctaagcaaaattttcaaaagcctataggaagaaatgaatttttcctaataattcatatatatgcaagcatatacatatataaacatatatgatttgacagtctttatatacaggcagcccttgacttgcggacattcaactttaaatggtgtaaatttctgcaattcatgcaattcatgtttacagcatactagcaattcaccttcatgttattattacaatttaatttatttttaagagatagggttttgctctgtcacccaggctggagtggcatcattgtagatcactgcagccttgaactcctggcctcaagtgatcctctcgcctcagcctccggagtagttgggattacaggtgtgcaccactgcgcttggattattacaaaattttatgcaaactacatacaacttccattgcccagtgagctttttcctttcttttaataataacagccaaacctctttcattaataaacatgctaacctctaagaaatgaggtatgttacaggtcagtaagaatcataccacatagtgtactttcacaccagtgatagcttattaaatatggttttaaagtataattctcataaaaattggcatttaaatcttggagtgtcatagatctctatttggatgtcaactcaatacgcctcaaatggaatccctgaacttttcctcagcccaacctactcctctgcagtctttcccatctcagtaaatagtaactccatcttcatagttactaaatccaaaaaccatacacccatccttggtttgccactttgtagggaaatctcctcagttctaccatcaaaatatatccagaatgggacattttctcaccacctccacagataatatctgcttccagccaccatcatcatctgcctgaatgactacaggagctccctgcttctgctgtttctcccttacaatccattcccaacagatcagccagcgtgacccttacacacagaaggcagttcatgttacggctctgcttagagcccttcaatgatctggagtataagagccaaagttcctcctcccacaaacattctattatcttgacaacctcaattcctatcactctccccattcactctgctctggtcactctggtctcttgacccatctttagggcctttgcacacacttgtgcacaatgcgtcctgtctcagggcctttgcacatgctgttggggggtcagaccgtgcacatgcatcctgtctcggggcctttgcacacactgtgggggcctgtacacatgcatcctgtctcagggcctttgcatacgctgtctggggcctgtgcacatgcatcctgtcttggtgcctttgaacacactgtcaggggcctgtacacatgcatcctgtctcggggcctttgtacacgctgttgggggcctgtgcacatggatcctgtcttggggcctttgcacatgctgtcggggcacctgaacacatgcatcctgtctcagggcctttgcacatgcttgtaccactgcttggaatgcttattcccaacaagctcacttcaggtttttgctcaaacgtggccttctcaaggaggccttctttgaccaccatatttaaatttgaaatgcccatttccccagctccctcatcaccccatcttcatttccaccttacttttcttcttagcacttattaccatctaacgaattattcagcaatttgtctccactcctactcccaacacaaaagtactagaaaaggaggatgtttgttttgatttctgttgaaactccagtgcccagaacagcatctagaatgtaaaaggcactcaaaaatattgttataaaatccagaaatagcattataagaaagttatatgctacaaataccagaagaaaatggcaaccagagctaaggtggttctctctcgagagaagccataggaatggggaggaggaggaggaaaggagactcctgctttgggttgctggacttgcaatactatttgacttttcaaacaatttattaaatggaaccatgtgaaattgctggcattgttattggtttttgactgacaaaacagcaatttcatctgcttcaaccaaatgcatatagtactttggagaaaacatataattttaaattattttaagtaattttggtatgaggaatacaaaaagaaaagagaagacaaaagggaagtgattcacagatttggctaggtgaaaagaaaaatacctacatgctctaaaatttagcaaagaaaaagttaagacacaaccagaagaccagaagaaaatgtgggcaacagagaagggatgaatattcataatataaaaagagctcatcaaattaacagaagactgatgaataacccaacaagaaaagggggcaaagaaatggttaagaggaaaaaacaagtgggattgggaggaaaactactaaaaagtcccacaattacgataagtcacagaacattttaacacgttttttaaatacatatgtttaccatagaatagttttgccatttatgttagcatgttgcttataagccttgttttaaaaacacataagatctgtaggcatttttaggatttggcttttgggggaaaaatagaattccacaagataattttctcaagctatttgtaacaaagtaactttttagcaatatattcttttttaaatgagagactatgatcaaacttgcttattctacaaaagaactaacgtcaaatctttggtcattagttgaacagcttccataaaagaagatacttttatcagcaacactattcatttatctgtcctattatttcactgtggaaggatgtattctttttaaaagtctttttataccgtatgactctcttctcaggtaccctcctaggtttcctaatcttggtggtatctcaaggaacttccaggtgcactaaccttgtggttgtctcttgcacacattagaataagtatttagaccaggaggacataaagaaatgctgtcatggtgcacatatactaaaacacattggtcacatttctccctttgccatactcaaggatggaaatgaagctattttttctaagaccaagagttgaatggagtgaatagctgtactctataatcccagctagtcgggaggctgaggcaggagaatcgcttaaaccagggagttggaggttgcagtgagccaagatcgcgccactgcactctagcctggcgacagagtgagactccatctcaaaaaaaaaaaaaaaaaaaaaaaaaagcaaaaaccctgtcaaagccaggtaggcagaaagaccttaagttatccatctgccaataagaatacattttgcacaacatcagcccttgaagaaacatattgtctcatttttctagaaatactcttgggttacctttactttcccatggttgaaaatatggatacaaagaaatactttgctattatagcacaagcaccagtacaactgttaggagaatggtaactgacaacctgtctcagaattggcaagtaatgaggaatggtgtggactgcgatgaactgaagtgctcttaatctctccattaaggaatcagttataatgcagctcagctaattattattattttgagacagaatctggctctgtcacccaggctggaatgcaatggcgcgatctcagttcaccgcaatctccgcctcctaaattcaagcaatcctcctgcctcagcctcctgagtaacttggattacaggtgtgcgccactatgcccagctaatttttgtattttcagtagagaaggagtttcgtcacattggccaggctggtcttgaactcctgacctcagatgatccactggccttggcttcccaaagtgcaagtgctgggattacaggcatgagtcaccacgctctgcctcagctaattattaacatcgggaaatgaaggcctattttgcacaaaccttttgttctgccaaatgagccagaaattttcatatgaaatttctcagtttgtaggtctaacaaaaaatatggatctttgtcccaacacagtctgcagagtgtctgtgagccaccagtttgatatgaattattacatgattcatgctattctcattctacttagatggtcccgttttcttctataattgtctgatgtagaatggtctcttggaagcacaaagctcatcaccttttccaaagaaataattttgctgggccatgggatatctgtatgcttaacttcacctgctagtgccaaattattttatctaaaccctcccatagtcttaattccacccaatctagtcttatttggacttttttctctaacggaattgatcgctaaaactgtgcttctagactattacctctcgctactaaaagcagagaacttaccaggatacctatctacagcagtggggagaaagtcagaagagaagtgtaggtgaagataagatgcctgtaacaatttctaggtagtcctgcttttgtttatattaataacatcccttggcatctccaaactggagatttccttagaaagttaatcataagttgattatattgggggctgtttagccaacggttatttagaggggttatgggaataagaagtcataaggaaacataatcaaaaagatatttgaaagaaaaagttatttagaagctttgaatcatttacagttaaccacaattatttcctttttcagatattcaattctttaccattggctcggtcatctctgcctataaaaatgatcatattatcctctctcccactggagcactcctatcctcaactataaaaactgcctcggactcaacggcaatccttcctctgctgtcaactctgtcactccttgacaccttgcaatttggcttccggtgaaaatgtttctcagatgttatcagtgattccgcgttgccaaattcaatggcattttgtcagaactcattgtctttatgtgctctaaagaaacccatatttctgatcaccccttccttttgcacatcaatgtataatataatacatctactgattaaatactcattttacaaaactcctaaatgctagaagagagacacagatttaaaatccatattttgttctttggacgaaattttacacaaagaataacactgagtaccaaaatctggcaaaactttaataaatgtgtcaattacttaacctaaaacttatgatctcaccttatccagtaccaaactaaatttccaggcccaccatctacatatcatcgaacttaaatatgtccagtgctctttccgtgctattttcttctatctttatcccccatgctacctggaattacagctaacccttggtgcccagctctaatggcctctcttgtgggactgggtccctggttgcttcaggctacgatgatcaccaccttctctgaatcacagcattttatgtgacagtcatcagatagtgctttatgccacagttttctataatccctactgtctgattgactgaatataggcccttaaagttagggagcaggtaccattctttctatttttgagagaagcagaagcatgcagtgatggccatccatgtcttcacacctccctgtatccaagctctcagggggtctccttccacagtaaccctggcttggccatgagacttgtttcatccaatgagatattagcagatttgatgcaagcagaggcttcctgagcatttacatcctggagactgttttcttttgctgttctctggaactctgaaaccactgcatgggctagctttgcgaaaggtgaaacactccatgaaacagaaacaagttcacccacctgagcacccccaaaccaaccagaccccaaccaagaccccagcctgaacagatccaccaagctgacccaggccagaagaaccacactgctgaccacagtatcatgagaataaatgcttgctgtttaaagccattacagtttctggtgatgtagggggaggtgttaatggatgtaccgggtatctggcacactgtattattctgaaatgagtaaagaatacaattttaataaaatctctctcatcatccaattcttacttagtagattttctctagcctagaaattgaaatactccatatgtctgcaaagggttttctagtttgttttgtaaaatgaaaaatcaaaaggcagcaattgtaaaagacacagtacaaatattctgtctctgcagatggggatgtgacttcaggatgctccatttaccatctttgagtcctcgggtaaatactgtaaactttctagacctttgtttccttttcttaaaataaatacaataccactaacctcacagtattagagaaaatacacagtaaataccaaatacaggctctggtgcatttcttcaataaccaggagatattatcatcatacataattattaatcttaaaataagagagctgaagcagctgatctctaaatgtgtttctggttgggcacagtggctcatgcctataatctcagcactttgggagaccaagacaggtggatcattagagctcaggagtttgagaccagcctgggcaacatggtgaaacctcatctctaccaaaaatacaaaaaaattagctggccgtggtggtgcaggcctgtagtccaagctacttgcgaggctgaggtgggaggatggtttgagcctgggaggcggaggttgcagagagccgagatcatgccactgcactccatactgggtgacagagccagaccctgtctcaaataataaaataaaataaaataaaataatataaaataatataaaataaaattcaccattcattccctctcactactaaaagtagagagtttgtcatgatgcctggatgtggcaagagtgggaaaatttgaaggtaaaatgttggggaagatcattttaatgccttgagcaatttctaaatattttcgtgtataacaaccctcggcatctccaaactagaatttttccctgccagtacagattagaaagttggtcataaggcttaattatatttggggctgttcagtcaatgtttacttaggaggaggctgtgggaataagaagtcataaaaaagcataaacaaaaagtggccagtctcggtcgctcacacctgtaatcccagaattttgggaggctgaggcgggcagatcacttgaggtcaagagtttgagaccagcctggccaacatggcgaaaccctgtctctactaaaaatacaaaaataagccaggcgtggtggtgggtgcctgtaatcccagctactcaggaggctgaggcaggagaatcacttgaaccccggaggcagaggttgcagtgagtggagactgtgccactgcactccaacctgggcaacagagtgagactccatctcaaaaacaacaacaacaacaacaaataagcagaaagttgtcgggaagaaaaaggttatttagaagtgttgattaattcacaattaactaggtaattagaaaagtccagatgccattaattgtgtaaaattgcttagtgccaataggatgcttttccaccgtctatcaaaaattatacaattatttttatcttatatcaaaaatataaattagattaatataaagatagggcatctggcaacgtttccggaatataataaccaaagcacactaggaaaccctttgtgtccagcccattgagcctgtgtaacgtgaaggtgcatgccacccccaccgaatctcagagcatgcgagtgcaaatgcgctcatttcagataaaacgaggtaatgacttcgaggaaagcaacagaaagaaagagatcctcctccgtggccaagtgctcacctatataggttccactgttgttaccagcatagtcagcatcttctggatggagtgtaaaagcatacagaacaaaagccaagaaataaagcagaacagttagaaggccagccgcagacgcaaaaaaaaaaaaaaaaaaaaaaaaacacttaaaacaattaggtaaagcacagcatagaacagcccttgcaatgccactcttaaacataaaacagtttgttttatatttaagtttaaagtgatatttttaaacatcatgcagggtttttttaattcctccaactttcttcagtggtttcttgatgcagttccaagaaaattatacgagacttgtctgagaggtttatattttcttcttttttcttttttctttttttttttgagatggagtctcactcttttgcccaggatggagtgcaatggtgcaatctcgactcactgcaacctccgctcctgagttcaagcgattctcctgcctctgcctcctgagtagctgggattataggcacgcaccaccacacccggctaatttttgtacttttagtagagacaaggttttgccatgttggccatgctggtctcgaaatcctgacctcaggtgatccgcccactttggcctcccaaagtgctgggattacaggcgtgagccactacgcccgacctatatttttaaagttaagaaaatgatgccacctgatcccccaaagtacatttacttttgtaaatcaggctcttagataataggtaaaaatacagcacttattttggctcattggattagacagaaaggttaagatgaaaatatgtcctttctattgataagaagagatttcatgttgggagtaacaggggaatgaaatattggtatttcttttaaagaactgataaaaacatttgtaaagtaagcaatgtgctagtatttttaagtcacatgaatactaggctatacatatcttaaaaactttatttaagtagtggggtacttaatattttaggcctctttcttgtggaactagcagcatagactgcacagaaataaattaattgagaaggttcccctagatcctacatcaaaatacgtctgtcaatacatttgaataatactgtttatttcattcacatttaagactactgacagaataaaaatataatgtattatttcagattacattctatatttctgctgcataaagcaaaaaaatgcatatttctttctaaaacaaagtgcaaccacaatttttggtattgtaacgtcaagatggaagtttggatgtacaacagagtacatttgtaagttgattgttatattcaatttaatcctacatatatgtgcactaaataaaatgactagactatgcagggtaacttattatacatgtacctttaatttcctctgagaagcacaaagaaaatgagaaaggaaatgattaaatgtgcagaaaatgcaattagaataggaagatgttgcacccaaaggaaaaaaaaaatccacctaccacactcaactgtttcctcatcttagcaaagccaaaggaaaaaacaaatgtattttaaatgtttcaaaattatcagtcaacaaataaatagaatttatgaaaaactacattttaggctgcactgcagccttgttttaaaaagaatgcatacacttaagttgtcaaaacatagtccttacatagcttattaaataaccaaatgggaaaaataaccagaacaaaaaccttcagcatttttttcaaaataatgtctttaataaggggattacatttattttcatagaacagttttgtttgtaaatcaatctgttcaacacttaaaagaaatttctcgataaaaatagtggaaagaaaaaaggatattagaaacaacaaattttgtccttaacatatctaaatatcctgtaaatttaacaataacctgacaattatcaatgttatatacatatcaaatgagttatgcagaatcatttatttttattctgtctatattatctgatgaaaggtattttagaaagtaatcctaaacagttcctaaattactaagaggatagcaatttaaaagttaaatatgacttcagagactcgctttcagaagggtggaaaaaatactggcaatattacagaggcaaatctaactatgagtcaaggtacaaagcatttcactacaatgacctcagagcaaataggagtgatcagaacagttctcccctcatccatccaagctacagaatagtggccaaagaaaacacttccaggaaggtgtataccactgtatttttatttttcaaatacctatggatccttaaactatgttggcttggtttgaccagtattagcaaatatcacaagcaaatcattattattattcaggctcgtgctttgaatcacccaagttgtgactttatttaagcacatgtcttagtaactctgacctgtcatgcgcatctaaagcaaacggttagaaaacaagaaataaacgatatgatgtggcttaggcaaacagctaggcatgatggacatcagatgggtcactttgaaatctcaggtactccattataaagtgggttgttaaacatagagtctatttttttataggaccaatgggatagattaaatactacaccctcgattaaagacttagcgccatggaaatcaaatgataaaagccataccacaaaaaccaacaaaaaattaaaacaccaatgccaatccacaaaaaaatctgtaatttatatcacatatagtacatatttcacattttaataaaatttcatgaatatgctgtataaatttgcaaaagaatgtttctccataaaatttttaagtagagagaaaatgatatttttatatcactgatataaccacacacatatattcagtagcaagtatcatgcttaatgaacatccagtaagaaaaggaaacagaatttctcagacttagcaagtttgaacaaagaggaaaaaatatataaaacgttgatctcagaagagagttgggatagtcacatgattattactatgtggaaggcactgttctgtgtacactacaatacacaaacttatttaattccccaacaatctatgagtccagtactataatccccatttttttcagataagaaagaaccctatagtgaattctcataattttatgttgctttggcatccattgtgaatgcaggcttaactttctcatatcagaaacagggcttagtcgcccttgacatggcttcaagctctctgcctcctcccacttcctcaaggcagcccatccagatatctgccttatacaactgcctgctggtgaccacctcactatgggacatacggatacagcctatttgactcactccgtgacctctacaccccacgtggaccatgcaattatgctgcagtgaccacctctcagtcacagcataactccacggaactcatgcctgctttctttacacccactatttagaactcccagaaggaaagcttgcttgggtaatgtcctggaccccagtgaaggctttggtccccccatctctcttgctccccacacactggttgagtctgcatcccagacaactcccctcttcctgttggccctgcgaggtatactgctctcctctctgggatctgtgagtaatacactacctctgctatttcatgcacccctgctatttcacgttgcctcctctgtgtctcacctgcccagcacacctgaatctacagtatttcctggtcagggcattcctagagagtggctatcttggtaggaataaaccggaaacaggtcagacaagagccccaagagtgtctgtcaatataatcaagtccttatgagagaggacatctggtcacaggtggacacttaggcattaggccttccaccagaaagaagtatcccaagaaaggcacactgcagacagccacgaccacctcccctgcatcagagcagggctagagtttatagccactttctagagagagctcaagaactaattagaaagaaaaaaaaatacaacacacttgtccatgttaaaactgggatttggacccatgccatctggctcgagtctgagtttttaattcaatgctatgctaatcatgacaaaatcatgttttgattactcaagtctcagactagaaatgggcaggagagaggtcgagggacataaagtttcttacaagtttcctactgacttagcatgacctcccatggcccgccatccctccccaaagcttcggtattccaagggagagtctcctgccaggagtggccagggagggccagctcctctctccagtgttatcaagagtccaccatctgctatcttcaagtacattagagcaggagaggaaagttagaaaagtgacaaaggggaggccaagaagatctcaaaaagatgaatgtggctgagcacagtggctcatgcctataatcccagcactttgggaggccacagaaggaggatcacttgaagccagcagtttgagatcagcgtgaaccacatagtgagaacccatctctacagaaaattttaaaaattagctgggggtggtggcgcatgcctgtagtcccagctactcaggaggctgagacaagaggatcacttgagcccaggagttcaaagctgcagtcagctatgatggtgccactgcactcaagcctgggcaacagagtgagagcctgtctcaaaaaaaggaaaaccttttttttttttaaagagaaagataaatgtgctgtcttaagagaatgaactagaaaggttctgtgaaaagcacgtggtgagtcctgcacactgggcagtagtaaacgtcccattctgctggatgtcactctgcaagggacatgtgtgacactcctgacaagtggagaaactgtgtctatattagtgtgctattattcacatgggcaaggttaaatccccatactagaaaccactttcctaaattccccaccccctaccgcaatccgtcctaaaagtctgcaataatccgcaaccacagatcagacccctaagagttaaccaatgctttccaacctgcatggcattgagtccccaggacaaaatacaagagacaatagggctgagaacgcttccaatggaaagactagaagcatctactctgatagtgtttgagaagcaacatcttggggaatcccaggagaacacagttcactgagactgagtgtgagcagtaacagttagaaggttcttcacctcaaccatcttcgatttaagtgatcagatatgaaatttacaacttagttcatctacacctctttccacccaaactctgaactctggcatcttccagatagtattagtattaggggaaaaatacgttaggttttttgtttgtttgtttgtttgttttgttttttgtttttgtttttttttgagatggagttttactcttattgcccaggctggagtgcaatggcacaatctcggctcactgcaacctctgcctcccaggttcaagcgattctcctgcctcagcctcccgagtagctgggattacaggcatgtgccaccacgcctggctaatttttttgtatttttagtagagacggggtttcactatgttggttaggctggtttcgaactcctgaccttgtgatctgcctgcctcggcctcccaaagtgctgtgattacaggcgtgagccgctgtgcccggccaatgttaggtattttttaaaaccccacgtgtttctgtttatacaagaccccaccaatattaagaaaatgtttgacaatgttttagacatacaaacttcatgtaacaacataagcaatgtgtttgtttctgaattaactttatgtatgaaaacaacaaataaaattacttaagaatccaggaagaagaagcttactcaacttgaaaagctttattacaatgacttgtagcatcctgtgatatattattcctaagtgttaagacattccaaaataccggtaccgtgtgcagtgaattcgttattttactcaatgcttaaattcttttttgcctattgtgattatcaactgacaaatgtttgcctttgaatgaactaagttacaccttgcttaaatggataccctttggcttcagttaaatgttttctttttacctgcataataataatcatgactagttaaaacaaattctacaataaaatattttgtgttttcctttctaatctttaaatggttgaaaaattgtacattcttgtttctttgactgcaagaattttttaagagttattgtgtaaaacaaaaattttgaattaaggttattcagtcagcaatattagaaacttttaggttcttatattttgataactaaaaaaaggaaacaacactataaaaactcacacttgaatattctgttgtaaaatacactacctgaataacagctttttcttactcctttctgaagacaatatatactggatttaaatatttaatataaatcacatcctactgaacttaaattaatttgatgtcattaggaagacaattcttaacttgtatttagatttcaatagaaaagcaacaaacaataccacaaatgaattcctatttctttcttaacggttaggtagtacatgcaaccaaactataaaaataagttttaggcagaaaattagaatactttaaattatattgacacaagaaatgcaagctgccaagttcctgtcatgcaaaagtactcctacattctatctgagacataagattcacttttactcatttccagaacacttaagctacatcttgtatataataatctaaaagctggtcatataaaagaaaatctatcagactttgaggcctgcttttctctctgcattactaatataaatccattatgtgggaacctatcattagatgatggagagggagggaaacaaatttccattacaaatatctttgttcggtaagcaattcttccaaaaaatagggggaggagacaagtccttatatccagctacttaagacttagaaatattttaggtttaagaggtcatgttttagttttcaggaattttttaagaggtaaattatttttttgtttgaaaagcctttttattcttctgggtttgtattagatacacaaagattctttaggggaggacataaccaagcaacaaagatgaatatgacttgcacttatgaattttgcataaggaggctagtttcaaagcctaaagaggttgttattatcatggctcctgattttacttaccttggagccaagaactagagctctagcacaaatataagtgcaaaaatgcaaagacagtaagattgggatgtgcccttccttatttatttctatgttgatattaactgaaaccctatagttccagaaccatcttccatgaacttttcccccatgcaaactcaagttatggtgatacactacaaatgaaataaaaagcaaaataaagatttagaaaagagtaatacgagcaatcactttgtataaaaagttaactggctaatttcgtaaatggtattatgtgactaaattcattatttcaaatcctatatttgcaatttcctcctagatgttaagtacacttgtaaaaattagtggataaagtttttatcactgtatttttaaaataaatttataaacattgacatgatagaattattcttcctttataaattttaattgaatcagaaactttttttacaaccctattctattaatattcaaaatcataaaaacaaaagattttataccaacttgctgtttttcttcatggcattttcctataattcaacaaagggcatgataacgtaagtttcctattccaaaaccctaagtaccaaatattgaaatccagaaagtagtggatcagatggcctttacaagttttagtttggtaaagaatcatcatcaaaacataggttaaagtgtttttaaatgccatttaaaatgttcagaatcaatacaatgatttatgcataacttttaactttatgtgagacaatattcaaggaaatttcaagtagaatttcaattctttgagaataaagacattagctgcctatttgtcacagaaatatattgtctctctgaacaagtccatatctgttatatgtttatgatttaataaggataattttgaccagatttatttgaaaataaataacatatataaaaacaaacaatgcatctctcagtgaatcaaactctagtttaataagagagacagagagagaggagaaagaaagagaggaggaccagcaaacatttctgaatggtattcaagaggcagaaaaagcaaaaacaaaaacaaaaaaaaacaaaattagtcaaatgaggacatttcagtaaagataaatgctagaataaatatttatcagatccaaatattgaagtattaacataaaaaagaaatcatgcaaatcaacatacaaaaggactccgttacaattaatacttctacatacacacacaaacaaacacacatacccccacacacacctcaccttcctatgcatctatatagaaaccagtttgaaagagctattaaaaagcaaaatatcccttttgtatagttcttttaaagaaatacatatacacttatcaaaaattttcaatcaatgaaaatttataataatatcaaactgtacatttctaagttgcctaggactgaaaaagagttgagtatggatccagattcgagtataattacatttatttcatctttaagtgacacattatcttatcccacatatgccaaatatattagaaatgtgtaagcctcctatttaaaaatccctttgagagccagtcaggcaaggagcctcaaagctcctttctgttagtgagttggccagtgaaaagtcatcacgcttaagaacagtgcaatattctcacgaaagctttaagttttctgatgtcagaagacttgtagcattctgtgacaagggtttttttccttgtgcctagacttaatgtagcaaggacaagcaggcttttgaatgagtgctccactttaagcatttgcctgcttgtgagatttatactcgactacagtttggctcccttctaatgtgattcctgggctatatgcttctgcaaactgacagaaatcacaggagatgtgaaaaatgcaacaatactaaaaacagatgttggtgtaaaattccagggccatttatttggtcatttcgctgtttaatgtacagtttctatgctaaaaacaaagggttggttttttcctcttaaaatacctagaaccatgaaacatctaggcgaggtggaacagggaatttatgggatgcagacttgaagagctgggtggtgggaaataaagaaaagctgacagaagattaggctgaaagagaaaaaaaagtatttaaatgcacactaagtttttcagtagtcatacggtagccatcctttgtctttctctcattttcttttaatctagtctggtaataactccaaagggataggctaaaggtcagaagtattatgatctggggataagaaaggaattaagaacaattggtcttgagcacaattgcttttgtacccaagaaaatggtagattttttttctccctaatctttaccaagaaatacctaacccaaacttcctggctttgaagaaggaagagctgtattttaggtgacatttaataaaataactatatttggaaatcaaagacagtagtagtagtagtcactttcttaaagagtgagtcatggatttattattaacaacctcaaccacccctttcctcaaaagattcatgttaatattccaaatatgaatctcatatttgtttgttcctgagaactgatgatcccaaagttattgctagggtaataggaccctttgttctgccatgagcacctgctttaatagtcaaaaataaacatcagggtttggtttctctgcattcttattaacaaacttacatgatttcctgttggaaactttcaggggctgaaccaatatttctggtcgtctcaaagccaatctcctgggagaaagaaggtcaacatacctatcaattttcagcacaggtccgaggtgaatacaatatcaaaatatttagtcttaagaaaaaacttaaaggttagagaaaaaaatgaatgtaatgcaatagattcaaattaagaaacaaatcgcccactttcaaatttttgtaaattatcttccctccctccaaaaccactggtcttttttttttccacctttcatatcaacatggtttcaagatattaatgtgctattttccatttgcttcataacaaaaatctaatatgacccagtactgtcatattatttttggtcattcatcatacttagttagacaaaacagaaatccaaacccacaggataaaaaattctaaggcaaggttttatagcatattttatcacatcaatgccagaatgatattttgcagagaacaaaaggtcagctggagaaaagccattattatgtaccagcagctcacctttcctggaaatgctttgaggggatcaagcctgccctggggttggcatcagcttcgtgtttcgcttgccaccaagttgcatcatcttggctcataatctgaagaatatctccctttttgaaagaaagcccagcttccttacatggaattgccttatcctcattaggattatagtcaaagagggctttgataaacatctggaagaaaagtttcattaaagatgaataaagataaaaaataaatgtgaaatggcctatattctcctaactccgactccaaacatagtaattttaaaactggaatattgaaagaaatgtgttgtgacaaagtggatatgtgttggatggaaaaacatgacttccctcccacgcacgaagaaatgtttttaagcaataattaccttgccttcttttgatggtgtctcctctttgctgccgggtataatcttaaatgtaattgctccctgagactgagcctggtaacagataaaacaaggagttataagaaaaccagacccaaggaagaataaggtaaaataggtagaaagtgaaatgcatctgaaaatttacaagcttggggcttctactcttagatagactaaacggaggaaactatttttgtagaaattcctgtaatgtgagaaagaaagctctgaagtttgtagaataagttaaaaaacattaactcctaaatccacttttacttcctgtgtacttttaagctgtcaagtaaatacattcccatccaagtttcttcgaaatagaaacacacaaaatatgcacaacaccttaaataaacacagtattcaatgactagaacagataatgtataaaggtctgggtgcagtggctcgtgtctgtaattccagtgttttgggaggcaaggtggcaggatcacccaagcccaggagttcaagaccagcaatatagcaaaacccctgtctctacaaaaaaaattttaaaaattagccaagcgtggtgatgaagctaaggcctcttgagcccaggagttcaaggctgcggtgagctgtgatcgcaccactgcactccagcctaggtgacagagcaagaagcttttttttttttttttaaagaataatgtacaaggttcatacagttacatttaagtatcagcatccatgttttgggggacaaaacacctataatgtcagtagtgcagttacaaatacatgattcaattagtggcaatgcccatcagaaaaaaaaaataaagaacattcatatctattgtattctggtgagcgagtaaaatatccaacgtaatagattaattgaaagatgaaaagactgagtatctattctaacttcattaaaataagtaccagcacccacaagtttttgttatctcagataggatttctctttaaatatagtctcatgtcattctctgtctctctctttttaccatgtattgtagccatatttaattatttatgccattatttcataagatatgttactcctgctaatttgtaagctccataaaagcactaaatacttggcacatttgaaagatatgaaaggaaggggggtagggcaagacatatctctgagtctcactatctgtggtgcactggtaaaccaggactccatttatttaaaaaaaaaaaaaggctctgatgtgtactgtctgtcaatttccatggtataaatactttcactatagtcaatttcaattcaccagcatgaagttgctgaaagctgagttgggaaatggtgcatcacacagtcagctctgggccgagccttaagaaggcagctctagtgcaacacagcaagttaagtaaaatgggattctgatagtttaaataatagaattttataaagggttgatttatttcaaaatggtaatatcattgctattgcttattgtagaaggcgctcacaaatcttataaagaattctcatactgtaatactgaattacattggtagagagaaaacaaaagtcttttctataatctcctcttatttttctagtttgtgtctgtgtgtttttttttaaatggatctatggtccttacaacagtgtcatttaataaggactcaattgttattactattactgctgagccatataggtctatctctcgtgattgcctcacaataatctagcatatggatgaatgattatttgatcaacgcaactttcttggtagtttccgaatatttttgaaaaattttgtttatacacatttaccaaattattgcttgaggattaatttccaactaaagggtatgcacatttaaaattttgatagtttcagatctcaaaaagttctactaataatttatcccatccccaaatcatataaatatacctattttcctataccctgaccaactctaggcattatcaagctttccaatctcatatcctgaaaatgctttgaggggatcaagcctgccctgggcttggcatcaccttcgtgtctccagacatctatgttttcttttgtaaagtatttgtccatatgcactgctgatttttctgtaaatgtttttcttattgatttttatcatctctatatattttgaaacattagccttttattatatatactgaaaatatttttcatacaatctcatttgtctttgatgtttctttatggcaccttttttctataaagaaagttttgaattctagtagacacatctgttatttttctatttgactttcatatcaaggttaaaaagtctttttctaccttataattatagaaattgtatattaccttttattgtgcaatttttgttttttttgcacttatttaatttgttgggaatttatttttatgtattgtgtaaaacaaggattgaccttattttttctgcgccattaacctgataccatctatgaaatgttccactgttttcccactgatttaaaatgccaccttaaccatatactaaattttcatatatacagagatctgtttttgagacacactcaaacctcttctagttggtataggtttccagtatgttttcacatataaaagagagtttcccttccttttatcttacaaatgaactttagaattaatatttccaaggcataaaataattttattcaagtgtcagatttcaaaagacatctaaattagtttgactaatttgtattgctatgatctatagcatggaatgtgactgtgtcaatgggaggaagacaaagataaatgcatcaccagccacagtgtagatgccatctgctaagtatagacttgggacagggacaggtactaaattcttttttttttttttttttttttttgagacaaagtcttgctatgacgcccaggctggagtgcagtggtgtgatctcgactcactgcaacctccatctcctgggttcaagcgattctcctgcctcagcctcccaagtagctaggactacaggtgactgccaccacgtgcagctaattttgttttgtatttttagtagagacgggtttcaccatgttggccaggctggtcttaagctcctgacctcaggtgatccacctgtctcagcctcccaaagtgctgggattacagatataagccaccacactcggccctaaaactctttatatatactatctcatttaatcctcaaaacactccagatggatagttacctcttattctcattttgcaaatgaaaacactgaggcatgaatagattaagatattttccaagaacacacagggattaagtgttcgaaccctgcactgcttaatacaaatcctgtctatgtcaaaccaagtctaaaagtctgaaatacagtgattcgattttatttttattgtacctttaaaagaaatttacagcttaccaaaatctgtattatttcctcaggccttttatcctccactggtatcccgttgacttccctaagttcatcaccaacatgaataagacctgagaaataggagatttggtaaattagcagtgttacccacaaccaaaactgtaatttgcagctgtttccataagtaaagcattgttaggttcccttaatacacttaacgaatggaaaggagaccttcacacatctcaggtttcagcctctatgcctctccatagcagtgactcaaaaaccacaacatagtaatgctggccaagaaatggtaacaggagcttggtctttgtctagaaatgcacattactgatatcttatactaatatactaataaaataatttttatttatcttaaaggctgcatgctcttagcagtacttttcaattgagaaatacagaagaaacaagatttttttttttttttttttttttttttgagacggagtctcgctctgtcacccaggctggagtgcagtggcacaatctcggctcaccgcaacctccgcctcccaggttcacaccattctcctgcctcagccttgcaagtagctgatactacaggtgcccgccaccacacttgactaattttttttttttttgtatttttagtagagacagggtttcaccgtgttagccaggatggtattgatctcctgacctcgtgatccacccgccttggcctccaaaagtgctgggattacaggcgtgagccaccacgcccggcccacaagttttaagatagctttggatgcttgtgtacaagaagaccatagagtaatgtttatctatcatttatttaaataggctctcacatttcaacacagagaaaaatatcttattacttgttctgctgtattagatccaaagatggttatcctcttagttatctactggaaatgctacacacgaaacacgtgattagtctgtacttggttaacatttaaagtctcaccacttctatctgcagctcctcctctcatgattctggccacaatgatcgccccggtctgttcatccttcttaatggtagctcccttttaagacaaaaacaaaaagcatttgtgggtaaatgtgtgtactaggtgttagaaaaggaggaaataaggacattcatctgaaaaaagagaaaacaactacaaaaacgaaaaaaaagaaatgaggcaggaaaaatagacatcatgccatttgtcttagaatgtctattctcatgactaaatagaggaaattctatctacatagcatcaaagggtttcagcccaatttaaggatttttgaaatcttcaacctcttcaaaactgtgtaaaataaacataccttctttccattataaaaataccttgtatttcaatgctgtttggtttttatccttttaaagcaattcttcattcatttcatccttatagtaccgcatcaagaaagtggaatagtgacaattacactaatagacaaaagattctatatgttaaaaaactaaaacccagatcatttgacttttagttagttcagtgatccttctatcaccctcagttatcatagtaaaaaaataaaaatttaaaaattaaaaaaaacttgggcgataattataaagaaaaagaaaaaagttaaaacccagaaattagttatatttgttgcctaagtctaagacaaatgattagaagaaagagctcttactccatggttttagtgaactaggattgtaactagtacaaatagaactaagtattggcataagattaggaaacagtctcaaaaagaagccaaaaattcttcacttacagatactcagaagcaaattaactgctgccttgtaagaacaacaggcacaagtggttactttgaaagcctttccatgactttccttttaagaatctggcattggttttgcaaagccatccaacattgcataatactgctaaaaaggtatgcttttcagtggcagcagaattcatccaaaagaagtgaaatttttctccagtttgtcaataaacacatttatatcattaaagaacagatatgtaaacaaagtaaaagtccatctgtaataagtatcctttatctataactatcagatacatagccaataatagtaaaaaagtcaaagaattaagtgacaggcattttacggcatttttcatcacctgtgcatgtattcaaggccagagacttgaatgagcatcacttcatggtcataaagcttagactcaccaactactagtattttctgcttttatttcaatttctaacttgtttccaaaatgactggaaatgtaatattctcaatataactaattagtttgattaaatcaactttcattttccttaatgacatgtctcaaattttcccaccaaatatgcccaacggcagaaaagcctagtaatctaagtttacttatccatagtttctggatgataaactgaatattaaatggtcgtaatttgtctaagatcagataactagtatatggaaaaatcaggacttgtttaaggtaatctgaccagagacacaatcattcatctcaatcatcatccaatactgcttaacctctatcttcccataacctttcgttcataagttcattctgtctatgagttcattactcttgggggagattgtctctaaaagggggatcaccaattccttccctccttgtatgtgcatgccatattcccacattaagtggtaaaaatggttttgaggcttcaaaggctataagaagatctgtagctgccacttgggcctcttgaaacacttgctctatgcgaatctcactgccatgtaagaaatcatgaccactgctatgctctgaggaatcccaagctagccaagtaaaggtaacaattagagaaagagacacttggccagcccccaaccttccagctccaagcccaggtaacagttgtgtaaatgaaggagccctcagttcactccagccaccaccatctgactgtatgtatgaggaactccaagtgagaacctcccagctgagctcatcaacccccaaaataatattgttttcgccacaacatacagccgtggtttgcaacatagaattagttaagtggaaccaatctctctctgtactatggactgtacagtttttcagtatagggctatctaacctgtttgttatacttaatgctagttcctttgacttattctgtattcaatgaagttgaccaatgtttattgagaacttactctgtgcaaggcaccgttctaagggcttataataaactgatgaaaaagaaaaaaatgtctgctttctcatcccaatgggggagacaagacaataaacaagagatggaataattacatacattatacagtatgttagagagttagtctgttttcatactgctaataaagacatgcctgagactgggcaatttatgaaaggaaggtttaatggacttatagttccatgtggctggggaggcctcgcaatcatggtggaaggcaaggaggagcaaatcacattttacatggatggcagcaggcaaacagagagcttgtgcagggaaactcccgtttttaaaaccatcagatctcgtgagacttattcactatcacaagaacagcatgggaaagacctgacccgtgattcaattatctcccaccaggtccctcccacgacacgtggttattatgggagctacaagatgaggtttgggtgaggacacagagccgaaccctatcaggtggtaaacactgtgggggtgtgaggggatgtagggcaggaaatagaagaccaggatgccagggcaggcggaggaaagacaatgtgaagacacaggactcactgagaagatgatgtctgagtgaataaagactggacggaggtgaagaagttagccaatgggaaggaacagaagacacagccagtgcaaaggtgccaaggggaaggctgtgaataaaatgctcaagagcgagcaaggcagcctgtgtggctggagcccagtagcagaggagcggcaagaggagatgaggtaaaggcagaagggagtcagcttatgtgctttatgagtcactgtgaggacactgggctttactctgaatgaaagagggaacatgcaaggttgtgaacagcaggaggggcacaacctaggaggaccactccacccactgtgctaagagtgaaggatggcaagggctaaagcaatgaaattaatgagaggttaatcccttgtctgaaatgcttagaccagaagtgtttcagattccagattttcttttcagatttgggcacatttgcattcttattggttgagcatcccaaatccaagaatatgaaatctaagagtctccaatgaccatttccttggagctcatgtctgcactcaaaatgtttcagattttggcacattttggatttcagatcttcagatttgggatgctcactctgcacagtaattcaagggaaagatgatggtggcatggatctgactggcaggagtagaggtgatgaaaggggatctggctatattattggtggagtctaaaggatttcccaacagattgcctatggaatgcaaaagaaagagagggattaaagataggctcaacttcttttggctgagcagctggaaggatggaattgccatcaactaaaaggggttaagacaagggtggaacagatttggggacaaagatcagcagtttatttttggatatgtgaaaattgagatgtctattagacctccaaatggagataacaaatagacagatggatatacgaatttaaagattagaagaaaagactggaagagaaataaccctgggagtctctggcacatagacgctttttaaagccatgggcagaataaaatcacttttggaatgtatagataatgcaaagcactccaacgcataagggtctcattatagacagagataagtgccctgatagaatcttcttgctatcccctgattctactttgcttggagggtaaactacagacttgaagaataatctctcactttctacatgatactaccacttgaatcaatcttcactttgaacccttcattcttgaagacttctatttccatattgttttccaaacctctcttaccacaattgtttgatgtattcccagtgcaatatatttccatgaaaataagatcaaatctcaaaaacacagagcacattacacgtgatactgtacaaaagtcatcaatcctatagcatagtctgccaacacaaaataaattaaaattggatctaatattttaaaaattacttattttcctacataattattttgaatttattctatgtgattttgttttaaaaacagagtatggagaatttcaagttagattgaaaaaataaattctggtcagatttttcttaattattaattctgtaaaatggtttataaaaggggactgcttactgggttatcatgatttccttaaacaaaaaatttatctcctatagaattgcttgaatccaggaagcggaggttgcagtgagccgagatcacgccactgcactccagcctgggcaacagagtgagactccgtctcaaaaaaaaaaaaaaaatttactttatttatttcctataaactgccgtattgcaaggtctcctcaagtaggtggcacagtgaatttcagattgagcctttgaaacaagtgtttttgaagtgtgatctaccaaaaacttgcaccaagaacatctgagacgctttttaaaatcaagattcccaggcaccaaaaaaaccctcctgatataaatcccttgggattcagctcagaaatctgcattgtaagtaagcatctcaggtcattcttccaataccaaaatctgagaaccactgttctcaaggaagcaagaggacagccgatgcaagtaacactgagaatttaggatcgaaatctactcaccaacaaacagaatttcattttcaagggatcttgccccttaagtaattaccctttttcctatccattatctaatacccacataacctgtgttcacagcctgttctctgaggtaaccattctctccttgagcagatgcaacctagcttttataagtattaactagaatataaattctaatatcttttaaatattagatggaatatattctaatatcttttaaatattagatagaatatattctaatatttacataatgtttgcataatgcttcagaactcataaaccattccaaacacattatatcttagctgatgttcaaaaacacttgcaaagaggtacatttcctgattttctgataaggaacctgaggctgagatggtgagtggtttgctctataggatacagggcaaagtgacaggatcccaactcccacttaggtcatccagtgcaagctcagtgttcatgtcaccacattatggatcccaataaacaaaattgcatttttagataacactggtaacctatcccttggttgccaaacgttacagcctttcctcatgaatcacttgccaagcatttcctgaccatccacttgctagaattttatttcagcttagcttccagcactttgcctacttctgattctcacgactggggctcattctcctaaagatatctttgactcttaatcttctctctgtgtgtttttcattgcgctttgacagtcttgtggcttctccaacaattccccgaactaacaaatgtcatttgactgatgttaaataacaaatttgttgaaagtattttctattcttctgggtagtgtattttttaaactttaaatttgttcacacaataatcttactttaccttaacaataattgcgaagataatacactaattatatatttgaatgagaaaaatttcaagacaagtaattctattcatttgatttcatattccaatatttaaaatgacattttaaatcttaatactttatttaaggaatagctaacaaataattttggaaatttcttcattgccattagaggttctatttttctatattaagctttttttatttttaaaaatagagctacttggacataaaataaaattaaattaaacaaatttaagttccacgcctcctgaccaaataagatcttcaaaagatgtttaacaaagaaattagatgtttacttcactgagacttctcaaaagttttgttggacctgctgtaaattagtttaaatttaaaaagcaattgaattaagtatataaaataacttaaagttgcgttcccatagacaatagcaatttttttaagttgtaccatgtaatctcaaatcaaccatgcttggtacatgttacgccttctttcataaatgtcaacaggttacattttcaaaatcattgctatttaaatgtagccaataaaatgtctattaaccttcactttcatttttcaaaagcatgttctttagacatcaatgttccatttcttttaaagtttaagaacatagaggaagtatattttaaagagttatacatggtatgcaccatcagatttggccctatcatggtatctactcatatctgagcaccaaaactcaccagtggttctctatttttgaccagacggattatttttactgagtcttcctcatcgtcaatatcttcaggcataggaggcaacactgggtcgtaattcttctgagccacagtatcatgtacagagagcaaagcctgtaatattcaaaggttgatttaaataagtaaatatacatacttatatattatatgtaatatatataaaatttcaaacacatcaaactataaggaaaatcaaaacagtgttacggttttgacatagtagtggtaataagacaattacttgaataggttcctcttacaaatggaatgggaaacagtgcttgtccagagagcagatagcagctctacttagcagccacctctgtccccagtgtcactgatgtatgtaaagaatcaacaaataatctcctctaagttgtacattctctggtttatccttaaaaaggtagcaatttggggcaagagtgcgggggatgttacttttgggggaagggagaacatgagggctaaagatgcaatgtcaaatagagtctgagaatattctatattttgttctttcctactattttttctcctattagcagaaaatacaatgatgatcaatatgacagattcttttgtctttttcctcactttaattgtgtgtgtaattggtgactactatgtgtataaaagaatgtaattctacaccaaagatgaaaagaacaccagaactttgacatgtcacaattcactattttagatgagtgagttttggactttcaacaaacttgacccctaataagcaacaccactattcataaattactcaagccatccttgaatcctctcctcttactgacattctcaataaccaatatatattctattttttaaaaacttttttttagacacaaggtcttgctctgttacgctggctggagttcagcggtgggatcatagctcactacaacctcaacgcctaggctcaagcgatcctaattcctcagcctcctgagtagccaggattacaaatgcatgccccaatgcccagctattttttttatttttatttttttaagacagagtctcgctctgtcgcccaggctgtagtgcagtggtgcaatcttggcttaccgcaacctccacctcccaggttcaagcaattctcggcctcagcctcccaagtagctgggattacaggcgcccgccaccacgcctggctagttttttgtattttcagtagagatggggtttcaccattttgcccaggctggtcttgaactcctgacctcatgatccacctgccttggactcctaaagtgctgagattacaggcatgagccactgcacctagtgcatatcctattaaatctgcttccaaaatatacctaaaggttttcttttctccacttagatcagagattggtaaactacaacatctgtttttgtaaatcaagttttactggaacacaggccatgctcattcatttatccattgtctatggccgctgtcatgctacagtggcaaagtttagcaggtggaacacacactttttacataaaaagctgtcaggtccctggtctagattatggatgccatcattttttgcctggagcactccagtatctttaaatggttcagcagcattcaactctggcccattttcaagtctgcaattcacagtgtagccagagtgattattttaaaaacttaaatcacataactaccccttaatagcccttctaaagttgcccatccattgggatgaccaaactctccaggatgtcctaaaagtcctgcatgcctctccaaccttatcttacactgccctcctcctcattcaacttgaataactctttctcatagaggtctggccaaaacattacataaaagcagatcccctggtgactcaatcccatagcaccttgttctttgccttcatacatgtccataatttataatcatatgtgcatttttatgtttatatggtttatatttgctgtctactgaaacagaagctctaaaatggcaaatagtgtctgttttaaatcaaacttttgaattgactataacatatatacaaaaagtacaaatcataagtgtatagtataaatttcaaaaatgaatatgcccaaataaacaccccgaaaacaagaaatacaacattaaccaaactccagtggcccccacttatgctcattcctagtcatcatgccctccataccccccaaagtggcgatctttccctttatttgaaaattatataattagaattacaagtgagtattcatttttccctaatattaagttagtgaaattcacccatgctgttacttatggtagaaggaattcatttttcattgctatatagttttacaacatataaatatgttgcaatttctttacccattatgcctttgaggggcatctgggttgttttccgttcttggctagtacaaataatgctgccataaatgtttcatatcttttgatgcatatatatatgatgttatttaagtatatttaagagtagaatgtctgggtcatagatatatagtaagcccattcaaaattagtagcgtttttcaattatacttctactaaaaatgtgagttctagctttctaacatgatcccaaacattttacattattagtctaaatttggccattccaagtgtatagcggtatctcctgtggttgaaatgttcatttttcttaaaatgaatgagaacgaaacccatttgtgtttattgggcatgtgtgtctcttggtgagatgcctcctcaagatatttgcatggttttctattgcatctgtctttttcttattaatttgtaagaactatttatagtatgctggacccagtctttatcagttacatgtgctagaaatacattctcccttttggtaacttgccctttcactctccttcttggttatttttgctcaataaaggattctaattttaatgagctcaataaatgtttttttcctttgtggttcatgctttttgtatccaacaagagttttaatggggaagaaataaacaacatcaagatgataaaatacctgagaagataatggctgcaaatttttgagaagtgatgagagaaagactctaaacgttcacgaagcctgatatatcctttaggaacaaggaaagataaaaagaaacctatgcttaatacatcacagcagaaatacaaaatggcaaaggcaaagagaagatcctaaaagtactcagagcaaaaaaagatagatcatgagaaaggaaagaagaaaactgattgacagctgattaacagcagcagtagacaccagaagacagttcaaataccttcaaagtgcttagaaaaaataatagccagtccagaattgtgtacccagcaaaagtatctttcaagaataaagatgaggaccaagatgaggttaacaggaatccacctgaaaaaactagaaactaaaaataaataaaaataaaggataatgaaaccatagttttcaaagatgctgggtatcaagcaacaaaggacagagatcactgagagacaggaaacaatgtgagcctatgactgccccagcattgcagcctagagtttccaggctgtgatggggaaaaagaaacacaggcaaaactcagtcgtctccttgagttgggaaaacagagctgggaatccagagacgtcaactgactagattctcaggtaagcctatagaagaggaaagggtggcagatacagaatttgggagatctgtaggaggtctcccttgagtcctgagcaaagtccttagccatggcatgcatataagaaaactaccagaaagaattagagcagtggctcttaactgagggcaattgtactcccttggagccattggcaatatctggagacaatttttgattgtcttaatttaaaggatgttactgccatctactgtattgaggccagggatgctcctaaacatttggtcatatacagggcagtcccctaaactccagaaataattatccagcccataaatgtcaataattctaaggttgagaaactgcattacaaggaataatccctgaagtttgcatagggcagaaatagttcttgttctcatcagttagcaggaaaatcctcataattcataggcactgagaagagttatgggatgggtattgtctcaatagtggaaaaaataagcccaagatttaatgctatgatctcacctaaaaaaaagctaaaaataagcctctgaaagatcaaaatgtttccaagtaatttaactgtataacaaaataaagctcaagaatactatctatagcaggggtcttcaaccccaggccacagaccagtacccgcttatgacctgttaggaaccaggccacacagtaggaggtgagtagtagagactgagcaaagcttcatctatatttatagctgtcccccattgcttgcattaccacctgagctctgcctcctgtcagatcagcagcagcattagattctcataggagcgtgaaccctattgtgaactgagtatgcgaggatctaggttgcatgcttcttatgagaatctaatgcttgatgatctgtcgccgtctcccatcaccactacatgggatcatctagttgcaggaaaataagctcaaggttcccactgatcctacattatggtgattatgtaataataatagaaataaagtacacaacaaatgtaatacacttgaatcacactgaaatcactccccaaacccccatctgtggaaaaacttgtcttccatgaagccgatcactggtgccaaaatggttggagaaggttgatccaaagaaacacaaaaatacccagcatccaacaagataaaactcacagtaactggtagttaatcaagataaaactcacaatgactcaaaattactaggtatgcaaagaaagcagaaaatactgctcataatgaagaaaaaaatgaaacaatgaaaccaaatactgaaattacacagatgataaactggataaaaccaaaccctaaaattacacagatagcagacaagaaaattaaaagttattatttaactgtatttcaaatgctctaaaaagttaaaggaaacactgaacatgagaaatagaatatataaaaattactcaaatcaaacttctagatatggaaagtatgaaataagaaaaaagtacactgaatgagattaatatagatactgcagaaggaaaagtaatactgtagaataagcaacatgagctgtccacaatgaaacacagggagaaaatatactgagaaattatgaataggactgaataggacttagtgatctgggcaactactttaaatggcctaatatacatgttaactggcatctccaaagaaagggggcagttgctggaaactatttaaagaaatatggcagaaaatagtccaaatatgatgaaaaaagtataaacccacatgttcaagaagctcaatgtacccaagcacaaagaaaacataaaacaccaccaaaatgcttaaaaccaggaagaaaatattgaaatcatccaaaagatttaaaaaacacattatatataaaacaataaggattaaaaacgacagcacacttctcatcagaaacaatgtgggccacaaaacaatggagcaacatctttaaaatactcaaagaaaaatactgttaacttagaattctatacccagcaaaaatatcttttagaaatgaaggggtattgaaaagttttgaaaaatatacacaagctgaaagaattcactgccagcagacttgcattgcaagaaatgttacaggaagtctttcagacaggaggaaaatgttggcagatggaaatgtgggtccatacagaggaataaagaacactgggaatatctactatctgtgtatctatggcatatcttgcacatagtaaaacagagatagctgaataaaatgtttttaaatgaagcaattatgataattgacaggcaatattaagaacatcagctaaatattttttctacttagctttgttccatgtctgcattccaaaataatttcataggcattaagtttgtaatttttaataactttgttttacaaatattgttggatagcaacatttttaattttggacaactaaaattttgcattccattatcctgttttaactgaggtgattttattctttaatatacagacttgcctttaaaaaggcaatacttaaatggaaattgtgtttccatatgccagagccaccaatcacaactgatgggtttacctgttgctcagaagaatctgcaggaaattgaacactaggccttgtaactcatcagactcacaagcactcactgcactggaacccctggagtcaactttatgttctaagtatctgtcaggttcacagaattaagtgtctagcttataaggatgagcaacattgatttatccctccagaaggagcttaactttttccttcagcttgctttaatgaagcttcattcatcttgcatgctcaggcagtgagtaatttctcttaagtgaatgtttggaagctaaaaattacaacaaatcttcttattttattgccttttaaaaaatctaccaaattttccatgactgcctaaattataatgccatattctagagatgatgtcacttcactgttttatcaaaagtgagcccccggaatgatgactcatacagtttaatttgcctttaatgtggcaatttgatggttagaagtggttttgatttattaatgactatctctgcttcccctagaaacaaagtctctatatagaacaatatccctccatcaatgcccctaaatgccaccaacattattgattttgcctatttcatcactgcaggaagtattcacattcaattaatctagttaggcctttggctacttacttttacattttcagacatctattgtttcttttatactgcatttattttcctgaactggattttgtagacattattgactaataagaataatctatttttcaatatggcaattgactgatcaattcattctgggtataatctttcaatttttgacagttctccagtgacactattgttacagaatgacaagtcatttcctaactatcaaagacttgagggcaacaggttatacaagaaaagtgttggcattcttctgaacacagcaagagattcctaaagagtaaaatgaacaaaatcacaatcttatactattatgaattaaagactatgaaagaaaagtttgaatgtcatataaatgtacagaattatcttatatgtagagacaaagaaggctataatggaataaaaattccaccaaacatttaataatttacattgaattccgtttactgggaatcccaatgttgcaatcacagtgctatgtgctagaaacaaagataagaagaccatcctgtgtatcatgaagtgtggcagactgccactgttactgcctgagaccctcattacagcagttaccactgttactgcctgagaccctcattatgagactgaatgaagggacgaacatagaaatgataacaaaaaacaaaagaaactattttaaggaaagggccaggggaagaagagagctccccgcttctagtgagcaaaggcagcccctgagctcctaccaccctttgtatttattgggtagaaagagcatggaggaggtaatgattggtcagctgcttaactgatcacaggttcacatcattgctaacaggcttcaattatgcctaatcaccagaaacacttgagcttggggcatgaatgccctcagcattccttctgggcagcggacatagttgtcagcttgcccacatcctgcatttatgagaagtttgctgtttactcatataacctccagtggtatactgagctgatcatgaccctcacactttcggcctccaacaaataagaaagatatacttttgttctttattaggtacagaacacagaaaatccctgaaacacacatacatacacacaaacacacacacacaaacatctgttaaaggtccagtttcgtttctggatacaagtttttgagctttaattttcttaatctttaaaagagttaatattagtacctacttaatagggcttcacaatgattaaagagataatacatgaaagtgcacggcaaaaaggctgctccatagtaaagacttcgtattgttggcttattagctattacaattaatttaatgattatcttatttcaggaacagtcacattgtatatttaaccttgtctataaacttgtaaaggaccatatataaattttttaaaaatcctttccatatagctattcttttccttcatatatttgcaaaagttggccaaactagcaagcaaacattttaaacaaattttatattaaaaaggttaacaggttgtatattgtgataaaaatgggtcaaactagaaattaacatctgtaaatataaaaaatgaaacccaaacaacctcacaaatttaaataagtcaggatattgaagttatcaaaatgtattatagacaatcaagaagttaatatcaatgccaatatgacatacacaatgtccatggaaggtgaccaaatttaagagaaagccgcatactcttaaatgtgtttgtaattaaacaagcgtgacagctaaggagcccactatctaatcaaagatagatataaagaaaaaaatcagaccagatgcgatggctaccgcctataatcctaacactttggtaggctggggcaggcggatcaccagacgtcagaagttcgacaccagcctggccaaaatggtgaaaccccaatctctactaaaaacacaaaaattagccaggcgggtggcatgtgcctgtaatcccagctacttgggaggctgaggcaggagaattgcttgaacccgagaggctgaggttgcagggagctgagatcgcgccactgtacgtcagcctgggcgacagagtgagacttagtttcaaaaaaaaagaaaaaaaaatagaattgataataatgagccagttcttttgagagattagataattactcatttctggtatgcagagcaagaaactagagaaaaatatgtatattaatagcactgagaaatgggacagaactttggatacaaatcaacaggataaattgaacaccattccaacatgcttgaaatcttaataaaatgttaagtttcctaggaaaaaataaataatgaagtaattctggaagagcttgaaagctggattaaatcaataactacagaagaaattaaaagcactatcaaaaaactttccccagagatggcactggaaccaaatgaagggttgtattaaagttttctgtgttatttacagaattccaacacatagtaaaatgtaacatttctttttcaaaggtctcacaacccaaatgtaaaacctaaccagaaagtataaaaagatgacagcacaactttggtctcaggatgattttttttaaatactaaagtaaaatattacaaaattagacataaaaatcttcttttatcaaaaagaagttttaatcccaagaatttaatgttttatcacataaatatctgcagttatttatgctaacaactaaaaaagtttctatgatcactttgataagtaccataaagtcacttgacaaaatttaacataattctgatttattttttttaaatgagacaacaaaactttgtaaaatattctatcagaaaccagccacaaacatcatacttattaataacaggaagcacagaagtatccccataaaagtacagaaaaacaaaagcatatcctgtttttactacaagttttgagcattttttcctgcaagtcatatcaaggcaataaggtaacgggggaaattatctataattactaaacaggaaaagatttttaaaaaatcttgtcaataacattgaaaattaaatgagatacttcggtaaggtggtataaaataagtattatggaaattaacatgtttactgtatagaaacaacatacttgttagaaaatactcagtaaatagtataccatgggggaaaattaatttatacatatgtgtagatgtgtgtatacatataaatatatgcatgccggcacacacgcgtacacatcaggcctgggaatagacttagcaggaaatagtccagggttatataaggaacaatttgatctaaataaataaattgccactgtctctggaaaatttaattgcatcccaatggtttttttttatgacataaaagagaattccaaatttcttctgggaaaatacatttgcaagaataatgataggaatttggccttagaaggtatcatgctacaattactaaaacaataagataaccaaattaacagcaatcaaaccaagagttcaaaacagattcagatatataataaagataaatcaaattgtgagaaaattaccatccacttgaataaaaaaaaactagaaccacatcttataccatacaccaaattttcatacagagtgataatttcaaacttcaaaaaatcacatttttaaaaagccaaaagaaaataggaaagacaattttcgtaaactcatcatgaagaatacaagtcctttccaagctaactcagtgcccagaagtcataaagaaaaagaatgccaaattctactatataaaagtacatatttctacccagtcttagaaaatgcatgtaagattaaagaaaaataactaaggagaaatctataataatgattttatattcttatgtcactcacaagtcattaggaaaaacacaaaatttttactaatcattatttaatcacacagtactcaatgaaagcctgctatacacctgcaatttttattccctattctcatgtggcttatattctagtggtactcaactagcaaagctaaaaaagaatattagttggggctgtgcatggtggctcacctctgtaatcctagcactttgggaggactaggtgagtggatcacttgaggccaggagttcaagaccagcctggccaacatgtcaaaaccccgaattgtcaaaaaacacaagaattagccaggtgtggtggcgtgcacctgtagtcccagctagttaggaggctgaggcaggagaatcgcttaaacttgggaggtggaggttacagtaagctgagattgtgccactgcacgccaacctgggtgacagagcgagactctgtctcaaaaaaagagaaagaatattagtcgaaaagagcttatgcaattaattgcatataaattgcaacagcatagggaaacaggccttctcatgcactatactgcaggtgctcgagaaggtctgtcttaacaacaagctggaaacaatgatcaaaactgtaaaatgtacaaacattatgtatgccccaataatttactgtcctaattaaagtatattttgacaaaatattccataaaatcctctaatatacaaaagatgtgcatcatagtgttatttaaatagcagaaaagcagaaataacaaaggttcgtctgtaagttaaaataggtaattttgttgacacaaagagaaggctacaaaatgccaaaaatattaaaagaaaaaaaaatcacattaagtagtgcattctatgatcccacagaatatactgggaaaaaacatttaatatttatatatacagaaagggttgaaaggtaatgcagccagccaagagcagttatccctagaggtatatgaacatgcaattcacagaagaaataaaaacatataagcataggaaaagatatgcatccgcactaataaagcaatgacgataggggcttctactttctttataatttgaatgaaaaatacaattacgtattatcaaaaaagaatatttctgtttccttttaagtctttatcaagtcactctgcaaaaagtaaaagtgaacataataaattatcacatcttattaaggacagatatcataaatcatgtatattaataaatgttccttctaatctcacttatggattttaaaatattctttcctttatgggtgcatgtttgtgtctgtatgtgtgtattcctatctttgtggatcaaatgcttttctattccatgataacataacttacaaattttcttctaatacatattttttcaattaaaaatattcttatggttcaactttttacacttaaatttttaatctatttgaagttcactctagtggtgacttttctcattttttcccaaactatttgttattccaagaccacgtattacaattgtccctcaagctgcccatcccccgtgcttccttccacccatcccacactctttcattaggacctcaatcgtgtgctgtgtgtgtgtgtgtgtgtgtgtgtgtgtgtgtgtgtgtgtgtgtgtgagactgagtttcactctttcacccaggctagagtgaagcggcgtgatcttagctcactgaaacctccatctcccaggttcaagtgattctcctgcctcagcctcccaggtagctgggattacaggcacctgccaccgccaccatacccgggatttttgtatctttagtagagatggggtttcaccatgttggccaggctggtctcgaactcctgacctccggtgatcagcccacctcggcctcccaaagtgctagtgctctatgtgaattattcctataggctcccactggccttcctccattcagtattgcatttctcccattctacaccacccaatgcctcaaaagcttggtctgtagactacatagggagtgacatgtcacttcctgcttcagatcctttcaatggctttccacttttttataagctcacgatttcaggtgtggccatataatttatcacccaaatagggaaacaaatgaaagtgggagaaaggctattactaataatgctggaactgcaggcatgaagccgactatcctgggcaaaccctactcaaaaggtcgactccccagctccaaactctcaccccttcttccttcgcaagccactgttcgcccgttctgaggctgcttttgcatttttacatcttcaaacttaaagttttcctttatgggacttcacatgctcttccctgtacctaaatcatttctttttcacatcccacccccaacccatctcccactcctttgtccccttgctgattccctcaaactgcaacgtaaggtctcaacttatatgccacttcctctgtaaagttttcttcaatattctccccctgcccaagtttgggtttagcgccattcctatgtatcccatatcatttccatacgctccctcttttaaatcagtatttctcctatcaccttcactagtgtacgtatatcctctataatctgcatccatagggcctggcacacactaggcattagaagaaaaaaaatctaagaataaatgaatgaatgaagatccgttgctggtgacatttataaactgccaaagaaagttataaaaattttcagaaagaattggcacacctcctgggttcacacaattctcctgcctcagcctcccgagtagctgggattacaggcacacaccaccacacctggctaattttttgtatttttagtagagacggggtttcactaagttggccaggctggtctcgaacttctgacctcgtgatccgcccgtcacggcctcccaaagtgctgggattacaggcttgagccaccgtgcctggccgtatctgtgtctttttaaagttctattactttgaagatatatttcaacttccttttcagtccaatgaattaagtatttaaaatgaaataggaaatctttaaaaagtaagtaacttccctaatccactagaaattaaatattcaaattaacacactagagttacatttttcatattttaactgtcaattcaactaacaacctacataccttgcttctgtttaaaaggaaaacaatcacaaaaagattttagtttactcccaggacaaaaatagattaactgattatatcctgaaatagtctaaaatttatttgggggcttaacttgttaaagtaatatggaaatgaggtcaaagcaatggtagataataagaatgacttcaagaaaagcaatgttaaatgttagatcaaaaaaggaaaaaagatactttattcccaagactagctaactacaaactgacattgccaaacaaaacatcatgtatcctggaatattacctattttctacacatatgaatatacgtctttcatgctaactttacacaattctttagtcacactgctagataaaatgaaaaataaccaaattatccacctaaaatattttccacataataaaatttaactaattattataaaattttatcaaatggcccttcttaataacgtctaaagtcatacctccctcttgagccaaataccagttctcatccagtataatattgcataattagctattccatttgaaacactcttgaaccaaataccataatcggggattttttttgtctgaaacatgctgctttcatttctaatacccttgaaccaaaacaataatttcaaaaaggagtttaacaagatattcatagctaacctcaccctcccctgggtgatactaacttctcaggtgcagtctaagaccaaatgaagaaatcttcagaacgttctgtggctaaaaatctccttaacgtttttacacactttgtatttaacatcaaggaacttttctgctctaatctgatccttgttctttcagaacaaaaatttaataaacttcctaaaccactacaaatcaattaccctcacatcattaatcatagcctgtttagcttttacagcaatacattcatgtacttacatttacttatagggattagggtttatagtccacgcatgttttttttttgtttttttgttttttttttttttgagacggagtctcgctctgtcgcccaggctggagtgcagtggcacgatctcagctcactgcaagctccgcctcccaggttcatgccattctcctgcctcagcctcccgagtagctgggactacaggcgcccgccacatgtttttaacctcatcttttatttaataccatctctctttttataaaaataaatttaaaaccaagttttaaattctgaaagctatttctcaaaaaaagtagaaactagtttttacatctaggaagaaattttcattcaacactctacatatgctcaccagtaatcatcacaagctaaatgatcattttaattatgtaattatgtaacctatatgtaattctgactcacagaacaatatctgacacataattgccccagcgtcaagtccaaaatgtatacagtgcaggatttagtgcagtaatgacttcagaataatgtaggaaaattctgaaatgcctgctgtaaactgatcacatttggaggaaaaataagtgataaacttaggaggcaatggaaagggagaattgaaatctgtctgccaatattttatgggtattttacactggaaaagtgctcttctctgtaaaatggaatgacattttgaaacataaattagtaaagggacaggaaatggggaggtgaaaggggaaagaaagaggaatgctgaaatgaccctatagaaaaataggtatgtttgtcaaacatattggaatcccattaactacccaagtaaaatggacctaaacaaaattactagtaggttctgtatagtgtactcttaactttacttaaaacaaaaatgaccttgaagctacatttgacagaacttaaattctgagcttcccaataagagtattttgcagtttctcatcacattataatcaaaagctcgcctctttctcattaataggatttaggctattaaaatactgtgccctattcaaaatacatttacttgagaattgatgctcgaaacaaaattcatctgaaggctcagaaagtggccctgtttgaaggtatttattaccggcgtaacatgtcctcaccttcacattgggttttgacagtagtttcaacagctctctgatctcactgtttaatggcttgttctgaagctcttcggccagctgcaacggagattacattgacttaaagaacatttagtaagagcattgtgggattgggtgtgtgacaactgagaatctaacttgctcaaggctattactttccaatgtttaaggagaggtcagcataaaagaaaacagatcatcaatcattgctcttctttttagaccttcggtagtccagatccgagcccaggctctcagctgagtacaaatcaagtaatcgtatcagccagatcaccttctgatttattgcaaggagggcaaaccccagcacttcgtccatgtgaatggtcttttgcacctagacaaaggaccacttgtaagaagaactggataaagctttgacactgtaacctcccccaacccccacaaaaacagagcttctgaatgaggtggtgaaatccacagggtttccaaaaacccatggggattccaaaaacccacagtagctgtgctgtttagagctagggtaaaaataattagaatgcccctaatagagcaaatggcctgaaacttttattatgtttacctatacagatgaagaaatctgttaaataccaaccaatcatagtaccaattgtaaaatgagctataatgggttgacagctagctaccctggtaccaaaaatgctgactgtactctactataataaccaagaattcccattttgggttctacataaagaaggtgttacaacttcaaacctgccccatatcttccattaagagatattcctatcaaaattcccattcaattttaggctataggaaagatctcataattttctttaaaaaagcaagactcaaacaggaaaaaagattagaattatgaaatacgtggcatatgtatagatgcatttttatttaaaaacccgtcttaaaaccttgcatgaaatttccatttgcccctactttttctaacaagctaaaaataattgctcttatctctggaaaaggaattttctctaaaagaagggcataatataaattgtacacaaaaaataaaatcatagaaaattatacagtcattaattacctttcaaacactgctttacttttttgaggtaatatttctacagcatttttaacttacaaaaagacataaaggtcatttgcacactttagtcacttaaaacataatatattttaacatttaaatatactgctctgacaaattataagatactatggtttatcatatttatatagcagtctctaactttttataaaggaatatttttgcaatatgattgggccacaacaacattggtttataaacaaatgtttcccaaaactctgaatagtaaatgttttaaaactgattttttaaggctttcgtgccttacttgagcaactgtatctacaactttatttgccttcatttaaaaaattttgcttcaataatgcagaagtaagcttcctcattaaatatatactgaaacatacttgtaatctttgtagataaaaacaaaaagaaaaatgggaactaaacaaatagcacgcaacttgcaaatttattacatatgtgttttttctaaattagaatgcaaagtagttcaaataaaatcaacttctcaagatggccaattttttaattatattatggcctggatattttaccacactgaattatatagcttgtcttaaaaaataaaggaaagaaatattaaaagcaacaaataagctacgggttatcactaaaaccagccttcgcactaaacatatttctcttccagcttcatgtcctttatagtttatccaggtgtgttctcaattcatccgagtccgaaagttaacagtaagaatcagcaagttagttaccttcccccaagttcaaaataaaattatagctacaggaaattaactactccatcaatgccaactgcttctaaaatttattttttggttatgaaggtaatttggaaaagtctaatatccataaatcattactatgttttataatccattataaaaacaatcctgtctttttatgtatttcatattatttcatatgcctcgttcgtatcctagtatctgtcattttttagtactgtcagcaatagagctatctcatttgtctttatttctccaaagcattcctcttgtctgtgactttctcagaacaccaacagctgacagcttctctctctccagagtttaaagcctaaaatgtctattacgaagttacgaaagcagaacaagagagtagctacatgcaaaatttttagaacagaaaagtgaatggaaatcaacataatattaacataagctcagtgatgacaggacttttggaaacatttgtaacctcttctgcttttcactcataggatcacacgcatctgtctgcactaggacaggttctgcctgggccaggtctgcagcagacacatcccagtgagctcggagagtcacacttacatcatcggccaaggccgccgcaccatggagaatgggcaccggactctgcttctcatagtagtgtagtttttcatgaatctggaagaaaatcaaatgcatataagttcacctgctagcaaacaatctcagatagctgcacatttttatacttgaaaagagaatctgaatccttgaatatcctaaagttatatgtttatgacatattacacacatgtaatatgtttgtacatgctaatataaacccataggtgacacgtatgtgtgcctaattcatctattactatggcccagtgtttacaacatggagtcaaatggaaaaaacagtcttaatcaaacagaacccacttgaaaactaagtctttgtctttcccctcaataagcatgttaagttttgtgatgtctattatatctaaaatctattgctgcaatatttcaagtatcagttgcagcttatattcctgctaaaaatgtaaattatgattaaagcaaagcaataaactgtcagccacattttggcaggttggtatggaatcactgtcaagagggaaggagctggcactatttgtgcctgggtgccacatccaggaacatctgctcaagcacactgttccttttattatacttattcattctttttttttgaaattgccaactttccccctcaacttcaaatttctaagaaacgaagggatttttcataactagtggcatttcttataattatttagcataaatgagatcatttttcatattgtaaaataattataataataaattttaaaaaatttagcccttcatttcccattattgtgacccaagaaacacaaaggcaagaatctacataaatcccatgtaagacacactgagttccttgaaaaatctagcagaaagttgagaaacaaaagacgtgttgacaaacacataactgtcagcacttaagtttcatctatttcagctcttgtgtaggtgtcctttcatattttatacttgaaaactcactttagtctctttttatttatagttgaagaaaaatgtcccccaccatatacaaaaaacagttgcacctcacaatttcctgtctttaacaggtatcaagtaatacactctttaattatactcaaagctaaccaaactccattgtaaaagtctggaagataaattttattctgattagccagatgctattgctaagagaggattctattacctttttggcaacccagtacacaatgtaaagcttcagggaaagaattttgacacttatgatattaccagaatgatcagagccacatttttacttaacatcttggaaattttaaagatgtatcataacaaggtaataaactttaaagactgtaagctataaaaagagttagatttgatttgagaaactatgaacatttaatttaaaacaaaaaccaatcatactgagctaaattcactttgtttaaataattatcgagaattaagacatctcaacatatagtatcacagaatacttaacttaccctatcacaaaactcatctaacctgactgcagttacttgtttaaatgtctgcttccctgctataataaacatagagacttattaagaacttaccaggtgcctgtactacccacctaataggtcagtaatactagtaacatagtctttaatgagtttaaaatttgaattcctcaattctcacaagaaaataaagaggtagacagcgggaccatctcattttacagataaataggagttaaacaagttgctatgttcttgcagacagtaagaggcagagctgagatttcaagctcaagccatctggctcagtgctggagctcctaatcacccacttttcctctcagactgacatctcatctgtgttcttcactgcgatccttggctgcctaatgaatatggccagtttgtagggcatagaaaggaaggctggaaagatatataacaaatcgcagtgactgcttccactgactagaggatcatcagtggttcctctccatcccttatattttctttctcattggtggttcctcttcatcccttgtgttttctttctgatggcttccaattttcccaggttaatttctatgaatactctaattataacataaaattatgtgcctcaaataaacacattatttctccacttcatttgcttcttctgagcgtctttcacaaatagtcagtttctcttccatcatcttctccagatcctgacccaattgatagagtatcccacccctagcctgcccactcctggattttgtgccatatcaaacattttttaaatgttctagaatttcaaagttctggtaaccctgtgttgcgtatgtgttttactttaccgcatcattttaaaaattaagttggtaggggagtaaaaatttactctaaataattttgagctgttcactgtttccaaaaatattgacagaaattctgctttttattactatttatgataaccaaaagaaaaaaatgatttttcaattctaataaacaggcaacacatatagacttcaccccaaggctatccaacagaactgcctgtgatggtgaaaatgttttatagccgtttgcccaatatggttagccactggccacgtgtggcttttgagcacttgagctgtggcttgacttgaggaactgaattcttcattttatttaattttatttactttacatttaaatacccacatggagccagtagccttcttcttggagaacatgacataactttatgcagtctataatttctctttatatcccagaaaaatttactctgatacagggtgacaaatttccctaagtgggaacatttggggatctagtagacaaatatataaccaaagatgtggcttcatcatcaatgagcaatctagcatcaattattaagtatcaggtgtagccaaacctgcaaaacctcatttattttaactacacatttccctttgcagattcaagacataataaaagtacacttcagaccgagtgtggtggctcatgcctataatcccagcactttaggaggccaaggtgggcagatcacttgaggtcaggagtacaagaccagcctggccaacatggtgaaacctcatctctactaaaaatatgaaaatcacccggccatgatggcgcatacctatagtcctagctactcgggaggctgaggcagaagaatggcttgaacccggaaggcggaggttgcagtgagccgagatctcaccactgcactccagcctgggctacagagcgagactccatctcaaaaaagaaaacaaaaaaaaagtatacttcatttttctcccctgagcaactggaagaggaggaagcagagaaggagatgagggaggaaaggagttaggagtaaagaagtctggagaaaaggggaaatctggttaaattaattttatataacagttattcaaaaacaagatcctaaaagtcaggacacgctaaaatatattaaatgcactattaagaaaaaaggacatttcaaaatctatatacattatgctctatgtatatgtccataagggtttttttcctataattacatttgtaatcagaaaacatcagtaaaaataaaaataattttaatatgtaagcagttctcataaggaagccatagttaccttcatttacatacttcctaaaaataaatgtttaattttagtgaggaaatctgttttacttacacatacaatagaacttttaaaaataaagcttcaataattaaactatgaataaagtaccccccaatgcagtcatgtgttttatacctgtcaatgatgtacagactccaccatggtcatctgcattacattacattaagtaaactaaagctgtaatccttttattggcttctattatgagtacaaaaaagtactgaaaattactgcccagtagtttgactcttcagcatgttaattaatggtaccagatctagaattagcacatgcatgcatacacctatctacctccatattttaaatactgggggtggggagaagattctgggtactaaaaaaagaaaatccatgggacacgatcctttcagaaacatgtatttatttctgatgcatgaccttgaaatatcactggccactttgctaactttacaatgtaggacttggtggataaaactctcaaatcctaagccatggaccaacaagtccatggatggttacaaactcttaaagcagactttcttttgttcctacctaatcccaggaagagccagaccagcttctttgtcatctccctagtagtttaaagttttctcatcttcccactcactaacaaagtagccctagaaaagtagctattctgtgtgtgtatatcataaagcctaaaaacttggaggctgtacctttgctcaagctacacagtcagaagtaaaaatgtaaagaaataaagccttcccataggaatcgctgggagcaactggtactttgccttcaattccagccagggtgtttgcaacatctctacacagatgcataattcttataaggaacatgtctataaagtctacaaaatacaaagcaccaaaaaccgtttttaggcttaaattaaatgattaaaaagcaacaaaccatcaacattttcattttggttgaaaatgtagtgatactatttgaaaccacttctcagaacattttctacagatcaaattcctttagttcccagaataatgttctagagaaagtagccagggcattaaacatttctttggaaaatctgagttagttggggtggggggtggtggggaaacttgaattctccaatccagagatatataatctgtcccattttgaaacaaccccaaatttctacatacatttatttttcactccccacatattacaattatgagagctgccattcttcaaaaatctgtatttcagtaattgttttttttttccagtaattgttgatgaagtgggaactgttaaatttttgatcagatagctgttactgcagatgatgtcatggaactcagacaggtttcaacatacaagtagcaatcaattaccttgtatacttgtttgcagtttacattttaacaaacattaaaactgtaattacagcttaaaactagttttgtaacaaaagatggaatgaaccgtcttaaaacgtggcgagtctgggatctatggctaggagagttcatgtgtgactcagttgattcatgaactcctgaaaactatatacaatttgtttgcatgcattttctaggaaaatacccaaatacagatgggtgatttatgctaaaggacttaagactttattcagtaaataaataaatagccattaaaggccaagtgcggtggctcacaccggtaagcccagcactttgggaggccaaggcaggcagattgcttgagcccaggagttcaacaccagcctgggtaacatggtgaaaccccaactctacaaaaaatacagaaattggccaggcatggtagtgtacacctgtagtcccagctactcgggaggctgaagtgggcagactgattgattgattgagcccaggaagtggaggttgcagtgagctcagattgtgccaccacactccagcctgggcaacagagccagaccctgtctccaaaaaaaaaaagaaagaaaaagaaaaaggcattaaagaataggagacccttgggccaatttgtgcttcactccattttccttggacagatttggggaggaagggaggtagcaggtaagacgaggaacagaaaacctgttaggaggatattgtgctagtggtcagaaacttaaaaaaaaaaaacaaaacaaaacaaacaaactggtcactgctcagtgcagatgactttggggttcctcaggtttccctttctttgcaaacacaatggacttaagcagttccatctcctctcagcagccaccacactgcctctatccccaaatctgttgtgaaatcagatgtactcttccagctattgttttccttgctgcctccaagataaacatataggcccattgtacgttagagatttaactgttatctccatagagaaaaggaaaagcactaaaaaaaatgaagaatttatagtattttcacagttttaaaagatgaagtatcaacataatttactgagagtcttgaagtcaaatacatgagtttaaatcccaattccgccccttacttatgcttaagcaacttatttaactttctatgccttagttttctcatatttaaaacaggataataatcgtatctattaactagggttactgtgagaatgaaagtcaccattaaaagagtttcacgcaagttctggaaaatagaaaacacctaataaacagtatttatttccaattcccctgctcgcttccactggtgttcctagtaagaggagattctcgtctccctttgactacaccatgtcgtgtatacatatgatacaatcaagacctaaagatcaacatcaaagattaatcggtatcacctatattcaagaagagaatttctgaggtcacgcaaccaaatgccatctctattgacatttcttcaaaaacagtccaagtaaaaagagaagaggacctgaacaaagggctaatggaagcctggatggacacaggaaaggcagacagtaactgtgaccaccagatacggacacaggaaaggcagacactaactgtgatcactgcaagtggcaaatgatggaaagggtgcaagaccaagctgagagtatcataaggaggtttcctggaggaatgaggggtgtgatgaaaaacctagatctacatgtttattaacaggttcaaaaagaatctgtctggacgcacccacagctctagctgccctgttcccaaagaagaaagttctatctttggtgagaagacagaatgaaaccctcacacaagaaaaagtgtaacagtgaggtggaaagattcttagaaaaagagtaatcggccaggtgtggtggctcacacctgtaatcccagcactttgggaggccgaggcaagaggatcacctgaggtcaggagttcgagaccagcctggtcaacatggtgaaaccctgtctctaccaaaaatactaaaattagccaggtgtggtgcagcgtgcctgtaatcccagctactcgggaggctgagacaggagaatcgcttgaacccgagaggcagaggttgcagtgagccgagatcatgccattgcacttcagcctgggcagcagggcgagacttggtctcagaaaggaaaggaaagaaaaggaaaaggaaaagaaaaagagtaaccgtcagagtcacttcaaagacgatacagggctagctatcactgttgtcagctctcatctgtctatcatttgggaatccaaagaccctctgcccacaagcccaaattctgttgaaattaataaggaagctcacataattttgagatgagctaggatctggttagggaatgtggagtgtattccaatgtgactgtatggaaaatgactattagacaggaatcagactttattcacaatggaaatacccagcaaccataaactggttgtcacttccttatttaagccctttggtggcttgccattgctcttgagatgaagggcatgcctgccaatgcacttgaaactcaagcctgttctggggctctgcatgccctggaccctgcagacttccatctcaagccattctccatcaggttccacccacagggaccttatgttagaccctcaagcacccagagtctctcctacctcaaggcatcctctctgcctgcaatgttcctgagtcttgggggtacccacattcatctctgagtcttagctaaaatgtcacttacacacagcttttcccaacagtcttacccaatcaaaaccagttctccttcattattaggtctgatggcttcctattctttttgttcactatccttatcagactttgtatttatagatttatcatatttatctgtttacacccccatcggtaaggaaattcatagatcagggacaatgtccctagagttcaccaccagatcccttgctcataacccaatgcctcacataaaatagatgttaaaacgttattattagttagtgataagtggacatataaatcctctaatcctgcacagttggtaacaccctgggatcaccgtggaagaggatgataaatgcaatgattttcttcttgccccaaaactgatgactagtccccaaagctgaggaaaaagaagtgttaagtctcatgttctaagaaaaactccaaacagctgaaacatacacttctctagactcaaagagatgggtgaaatgtaaccatcaactatcttctatctgccacttcccagaatgtgtgtgtgtgaaatttatatatgaaatataaatttcatatatacatacatacataggactacagagtggaaattgtcttacggaaataggaaaagaggggacagccggcaggggggcccacagcctagtgaagagtagaataatggaggtaagtctctgagacaatccctcatagagaacaggggtacagagaagacgacagaggacaaactctagctcctatgcaggcagcagactagctgattttcctttcgtgtttctctaatcaaggtgacaagggaaatgaggcaggatggcagaacagagagagggaacagtagaggccgacagttgcttggcctacaaatgatgcatgagttacctacaggtcacatggaccccactgaaagtagttgggctggagccaccctgcagataatccagcctacagcactacaggaggttttgggttacacaagccatgcactgtaagagaaatgcaacatttgagcacttccacaaagagtaagaatgctggtcagtgctggcctgagaagaggcaataatgtggccaacttctgtctccctgtcccaacacaacagaagaactggatctcctttcaaaagcaaaccgatccatcttgcaaagggtattgggggagtaggggtaaaaggagaacacactatcccccatccccaagccaactcccctacccctggctgacactagggacaggaggaggtgagactcagatcagagatgaccacaaaggaatactaaattgagcttttaataattgaaaatgtcctggaagctacagactgccagaaattttgttaaaagagatagaaaagttagctttgatgtaacatattttgatgcagtgattggagaaaattaaaactccctctttgagcactgtttgatttgttgtctagaacagtatagcccaatagttctcaacttttttggtctcagaactcgtcttagtttcttaaaattcactgagtatcttaaagagttctatgtgcttatatctactgataatttgtaatactgaaaataaaactaagaatttttaaaaatttattcacttaaaataacaataaatgtgttaaaatgacatcttaccaaaaatcagtatattttccaaaataaaagtttttgaagagtggcattgtttgacaaatttgtaaatatctttcatttctggctacaaaggaaacagctgaattctcctatcagctcctgcatcctatctactgggacacgctgctttggttgaagttcatgaagcaaatcatgcctcccacagacttgcagttggaagagagaggaatatgttcagagcctctttagctaagtgtagatactcactgatactacaccaaaactctgcagctgatactttcttagaggtgagatgcaatgtggaccctgcagctgcatcactgggctttccatatgcctttacattacaatccttgttttctcttgcattctacatggcgcttacccatgcatagtttcatgatattatgcattgatcatttggaaaatactgcttcactaagttatgcagattttccaaacatttacacatttcatggtacaacaacaaaaagccacacattaatatcaccaccaatctcatcaaaaaaagtttttaagtactagaaagctggcaatctcagagtggcagagacaagtttttcaaaattctaatacttgctcaaaagcttgaattttattcattggcaacaatacagtttgttgttggttttttaatgacaggcaaactttgatcattagaaaaaaaaaaaaaaagtcttccaaacaccacaatctgcatagacacagtttctaatggtttcctatgagaaaaagaaactagtttagttcacaatctcacaatcctacagctacttgtcctctgctaaccagaactctggtttgcagccaagtgctttctgagtattcccctcttccttctagattaaaaagacttgacagtaaagagatgtgtaccatggttaagatttaatgcagccaactattcttgattgtgagtgtgccatggtgaagaacatgacaactcactaactagtaccacttggtgccatggccttggtttgtgtgacagcatgagcagttttacccatcagtatttttaaccatcagtacagatgccaactcagtgaaaaaagcaaacaacatcataatattatcaggaaaatagtttagaccttgaagagcctccccacaaaatagtctcagggatccccaggggtccacaagccacaccttgagaaccacgactacctactatctctgaatacatgaatctaacaaataaaaggaaatctaacatttctttgtggctgcagaactcatggtgaactatatgactttggtataggaatattaatactttttcccttacaaacacggtcttctgaatctggcaatttacctgaaaccactggtccaggcttgtgatgtgtgtgactctcagaaccaggtgttacttttctaaaaaaccatgattttgaggtctgaaaagtagctttggggaaaaaactagtatatttttaaagagttcacttaaaaagagacacagaacaggttttagcatttcatgaaactgaagtttgctcaatcccttaatgtttcattattcacattttttccaaagttctgcctttcatgcttttcatgctggctgattgctgccaccgttagcgcatttaaacctcagcgatttataacatggtcccagactaagaagctctggcattggcccagtgctgctattatcatcttcttttatttatggcactatttcaaaatcgtcctttcacacactaacatacatttttcatttactttcatgcacatttatgttctaaaatgctactctatattgctgctttgtataataacataaaatgtaatttgcttacactgctaccatcacagctgggatattttaatgcactcaaatatatactgtagcatgtccaaaaaacagcgttccccaccccctcccaccccccgcaggttttatataatacactgcttccattcccttcttattcctggcagagttatctaaaatgtttttcttcctatgaaaaacattttttgctatgaattcttttttcaatagaacatgaaagctgctattatacaagaagctttgcaggcatgaataatcaaatataccccttggtcagtaagaaacaaaaacttgtaatcattttgcatgtaagaatacggtccctaggtggagagaggaaattcagaccgaagctaaacatttcattcctattcctaaacaacatttcctaccacctcaaagctaaacatcctcgatttctgaagtctaagtgaaaatattcgcaatttatttttaacataaaataaaacctttattttctaagaaaattatttccccaacttttcactcaatagaaaattctaattcaaatagattctaagtccttagaatcatatggctatacgttaaaacttatttacagaaaggaaattgtaaaaattgttatgcctttcttctagcttttaaacaatctcttggttcattccaacagataggtaaaatctgattactttcaaacggcagatggttaatacattcttattgatatagtttacacacccagaaaatccaagtcacaattcagaaagcaattgaattcaaatctgtcaaattctactactctgaaatccggctgaagtttcctctcagatcagctataacaaagcactgcttaataataaaacctaaatgaagctttggacttcagggatacaaagacaactctctgaagaagcaaaggaaacactgttttccatcaaattaatattttacatgtggaaatatcaacaattccactaaaggtgggaagaattaccttgaaaacacagaacaaggccttgcagtttcagatggtgaactgagcccacgaattgatcacacaccctactcagaatcccactgaaataaccaaataatatacagtacaaattttttttaatgcatggtaatagcagagaaaaatgccacccacaggtcaggagactctgaaatatttctaaaaaaatacaaagataaaaatactatgaaaagtctatctgaatcatcgtattcttctatacttaccgggaaagagagacctgcttaggaaagaaagtggacaagtatggccaccaaaggaccaaagaactccaagttcagagaagcagaggttcagaaaaacagtggggagcaggttattaattcgttgttcaatagtcatctactaggtgtgcagcaggcggcctctaaaatggctcccaaagattctccttctcaggacttacttcctggtgtcatcttttctccttgttggggggttgaacctactgacttgattctaatgaattgaaatattcagacaaaagtgatgggaggtccctcctgagatcaggttataaaacaccgtgacttttgtcttgcaggtacatgcctaagccccctccatattctttctctcactctctctctctctttctctctctctctctcatatctctgcttccatttttgaatctccttcctatgaccctcctacttccccgttacacagagcttgtgattacattggttggacccaactgaatagtccaggataatcttcctatctcaaggtccttaacgtcattacatctgcaaagtcccttttgtcatgtaaggtgacacagtcatagggtccagggagaaagacgtcttgagggtagtgaaggggtggaggaaggcatgaatccacccagcacacagcacctccaatcctccctgtgatctggtctctctttcctgtctgaacacatcccttcctctccctccattcatgacactctggccaccttgcacttcacagtgtcttgaatctagatccagagcctttcccaacttagggactttgtacttgctgttccttctgtctccagatctttaaggctgactccttgacattagatctcaattaaaatgtcacctcttcagagaggtctctgtgatcccatcttactatcttacctattcacccttactattgctttcacagcacagtaccatagaagttgtcttgctcactttttatttatttaacataagttctctcagaaaagagggctgccctggtttatcatgttcacacctatacacccagggaccaggataggcaagaaacttagtacatactcaaatattttcaaataaataaatcaggttaaaaaaatagtacttggaatttgactgcctgtagtgggagaaagaagtgtctggaatgagtactatattttggccaggcacaatggctcacccctgtaatcccagcactttgggtgaccgaggcgggtggatcacctgaggtcaggagtttgagaccagcctggccaacatggtgaaaccccgtctctactaaaaatacaaaaattagccgggcgtgatggcaggagaatcgcttgaacccaggaggcggagatcgcagtgagccgaggccgcgccactgcactccagcctgggtgataaaactccagagctccatctcaaaaaaaaaaaaaaagaatgagtattatatttctataaaaaccagaggaacgatgctgccatttaccgaaacacagaagtctgaagaagtagagatcaaatgtagaggagatacactgagcataaaggcttgtgagacacccacgtggagaagtgggacaggcagatgatgatataggcctggctttaaaaagaaagatcgagaccgaagacaaagattgggagagtcaggggatgtaaatggtaactgaaatgaactgaagagaaagaaatcacccagggagaaccgactgtctgcagtttgagaagggaagcagggtggaggagaggcccaggagacctcctgagaggggagggagagggataggagaccccgcagatgctggcatctcagagttctgggaaagcgctttttaatggtgagctcaccatgaggtaaaatgaaggtgttccagaactgaaatagcacctcttcacactgtatagctaactatccactattaggcttttcttggtgagaactacttggtagctaagtggagggctgcaacaggggactccaaacacaggtaggtagagaaggcaggtagtcacccgatagaagcttccattaaaaaagtgtgggtaagcgctcacttatgaataatgtgtacacatggacagtgtggaataatagaccaagagtgtccaacctgtggcccatgggccacgtgcagcccaacacaaatttgtaaactttcttcaaacattatgagatttttttttttcagctcatcagctatcattagtgttagtgttttttatgtggggcccaagataattcttcttcttccaatgtggcccagggaacccaaaagattggacatctttgtaagagacattggagactcagaagtggggcagggctgagggatgaagaataagaaattacttaatgggtaaaatgtatgttgctgtttgggtgatggttacactaaaagcccagacttcaccactatacatatatccatgtaataaaactacatttgtatcccctaaacctaaatcaaaacagaaacatgggggaattatgagttaatgaatggcttaacacaataatggcattttgaatgcccctggccaatatggtgattctcttcgcctcactaatacctatggctccaaatgaacacagagatcccaccgttcccagctgcagcaacaataatagagcatgtggtgtctgggtaatggcccccaaagatgtctgcatccaaatcgcccgagcctgtgactatgttacctcacatggtaaagggactttgcagatgactctttaaaataaagatattgattgggcactgtggctcactcctatactcccagagcttgggaagtcaaggcaagaggatcagttgaggccagtttgatatcagcctgggtaacagagtgagaatcctatccctataaagaaatttttaaaagttagccaggcatagtggtgcccacctataatcccaaattctcaggagtcttaggtgggaggattgcttaagcccaggaattcaaggctgcagtgagccatgactgcaccactgccctccgacctgggctatagagtgagaccttgtctctaagaaaaggaaaaaaaaaaaaaaaagaaagaagcctcattctctgctgtatggaccagatgactttagcctcaaatattttaaaggcagccatgataagttcatcacatcaaacctgaaaaaacatgggcatgacatcttccaaaaatcattttgataagcactgactcctgtcaggccaattagaataaaagtaaaatttagaatttagtgtcctggccaggcgtggtggctcacgcctgaaatcccagcactttgggaggttaaggcaggcagatcacctgagttcaggagttcgagaccagcctggccaacatggtgaaaccccgtctctactaaaaatgcaaaaattagctgggcgtggtggcgcatgcctgtagtctcagctacttgggaggctgaggccgaagaatcgcttgaactccagaggcagaggttgcagtgagccaagatcgcgccactgcactccagcctgggcaatagagcaagactcatctcaaaaaaaaaaaaaaaaaaagaatttagtgtcccacatggtcctgaaggtgcttatcttccaggcaaaccaacaaatgaaatttaaatcctgatgtaccttaactacataacatccttaataaaactgtataatctagtcagagctttttttctactcttttattctttatcttatatcattcagtacataaaagagcatgtaagcattttgcatattaataagttataatttactaggaacatctaggaacctaccaacaaaccatccactagaatagtacaaatattttacatctaaccctgtgtgcccctttcccctccaaactcctccatcctccaagaaataaccattacccagattattttttaccttttaattttttttttttttttttttttttgggacagagttctggtcttgttgctcaggctggagtgcagtggtgcaatctcggctcaccgcaacctccacctcccaggttcaagtgattctcctgcctcagcctgccaagtagctgggattacaggcatgcaccatcacacccggctaattttgtatttttagtagagatggggtttctccatgttggtcaggctggtctcgaactcccgacctcaggtgatccgcccatctcggcctcccaaagtgctgggattacaggcgtgagccaccacacccagccttatcttttaatttttaaaaaaaatctggtcttacaactcttgtgtgaatgtttcaacaatatattgttctgttttgcttgtttttgagcttcataaaaatggtatcgagctgtaagaacttttccaacacttgcttttttcccccttcaacattacggttttggagatcactcattttgttccatattctatagatcatttatttttcactgctacataatactttgttctgcagaaaagccacaaattatttacctattttgctatcaatagatatcccaattgatatagcttttctgctattatgaactctgctagtggggccgggcatggtagctcatgcctgtaatcccagcactttaggaggccaaggagggcggattacttgagctcaggagttcgagaccagcctggccaacatggcaaaaccccatctctactaaaaatacaaaaattagccaggcgtggtggcatgcacctgtaatcccagctactcgggaggctgaggcacaagaatcacttgaacccaggaggtggaggttgcagtgagccgagacggcaccactgcactccagcctgggcaacagagtgaggctctgcctcaaaaaaacaaacaaacaaacaaacaaacaaacaaaacactcaaaagaactctgctactgaaacagaaagccaaactgcatgttctcacttataagtgggaactaaccactgggtacacggggacataaagatgggagcaacagacaccgggcctgcataagcgggaaggaaagcaagggaacagcgtttgagaaggcctattggatactatgttcaccatttgggtgaccggctcaacagaagtccaagcctcaacatcacacaccatatccatgtaacaaacctacacgcgtacctactgatctaaaatttaaaaaataaataagtacttggctgataaaaaatattcttgtaaaagtttgctggtatatatatatggaaatggtttcctcagataaattctcatgagaagaattgctgggtcacaggatataaatatttttacgttaacatcaaatgttttctaaaatggtgttatctatttgcaccccaccagaataacataaaagttgttccacatactcaccaatacttgagatttacagatctcttatattttgccaatctagaggacctaagtgaatagctagctcactgtggcactaatttgcaactcatgcttactggttaggttatattttctaggccaggcatggcagctcacgcctataatcccagcactttgggaggccaaggtgggcagatcacttgaggttgtaagtttgagaccagcctgggcaacatggtgaaaccccgtttctgctaaaaatacaaaatttagtcgggcatggtggcgcatgcttgtagtcctagctactccggaggctgaggctcaaatcgcttgaactcagtaggcggaggctgcagtgaacctagatcacaccactgcactccagcctgggcaacagagtgagactctgtctaaaaaaagattatattttctatatctactggcccctacatgtttctgatgttttctacccgttttctcttaaattgtttttttcactcttttgtagatgtgctttctattttcaggaagctaaacctttgtcaattatatgtattacaattatcttctctcaaattacggctagttttttcacttatttatgggacaccttgatgaactgaagttcttagctttaatgtggtaaaattttcacaccaatttttatggtaagtcgaaagatattcttttacctcaccttctttttttttgttttgaaacagagtctcgctctgtcgcccaggctggagtgcagtggtgtgatctcagctcactgcaagcttcgcctcccgggttcacaccattctcctgcctccacctccggagtagctgggactacaggtgcctgccaccatgctccgttaattttttgtatttttagtaaacacggggtttcaccatgttagccagaatggtctcgatctcctgactttgtgatctgcccacctcggcctcccaaagtgctgggattacaggtgtgagccacagtgcccagcctcttttatctcatcatctaagagttttcaggttctgcttttcaaatttatattcataacccatctaaaattgattttggtttatgatgtgaggtagggatccaaatccatccttttttatatgtataaactatttattttagcttccttctttttctacagtactgtcccagttccatagacttacaagtctgtaacaaggagttcttttgttcctttgttccacctgtctactcccatgccaataccatgccatcttcactattgagactctatgataaaacttgatatctagtgggaagagcaccccctatgccatcaggtgtgggttggcttgtggtgacactttgctggtatctataatccaaagctctaaaacacattaaaccactagccaggcatagtggtccgagcctataatcctcactacttggtaggctgaggtgaagggattgcttgaacccaggaattcaggaccagcctgagcaacacaacaagaccctgtctcttaaaaaaaaaaattaattagccaggaaaggtccccagctaattaaaacaaaggttgatatgggaggatatcttgaacccaggagtgaggctgatgtcggaggttctcttgagcacaggagttcaaggctgcactgagctatgattgtaccattgtattccagcctgggcaacaaagcaagaccccatctctttaaaaaaaataattaatacacgttagataattgccatctttacaatactgagtctccctatttgtgaacaagtatcactctccacttgtgcctcagtaaagtgtcataatttcctgcatgtaagccttgaacattttttgttaaatttttacctagctaactcatggtttctgctgctattgtaagtagggtttttttgtttgtttatttcatttcctgttggttgctggggttagaaacacagctgactttcatatacagaccttgcagtcagccacccagcactgaccactctattaactagtatgtagattcccgttgggttttccatacagagataatcctatcacctgtgaatgacagttttgtttctttctttctaatccttatccccactctcccttatcttgcaacggtgactaggatctctattccaagatttttttaagtggcgatagaaagcactttttatttgtttcttatttttaaaggaatgcttttcatttttccccattaagcataataattactatagatttcagtagatatccataagtttcctccttttcctcccatcctattatctaagagtatttttcttcttttaattaaaaaatgagggtgctcaaaatattctagttctgcctttatgtatatacatatatatgtttctatttatgtatatgttctgtttatgtatatgttctgttttgggtatattgtgattcctgagtctgtggtgtcatgggtcttctccagttctagaaagcatgtagtcattatcccacaaatatcacctttcctctattttctcttttttttaatttttttatataaagatggggtcttgctatgttgcccaggctgttcctgaactcctgggctcaagtaattgttccacctcagcctcccaaagtgctaagattacaggggtgaaccactgcatccaacttcctctattttctttatcatcgctgcctggatccccagttgagcacacattagactctctcattctaactttcttaccactgggaatttcttttgtattctctatcactccttattattacataattataatatttataatatataattatacatgtattattattatatgtctactttcttgttcttcagataatttttgaggtcactaattcttttcagctgtatctaatttgcaattgaagccatttgatccactgagttttttatttccacaattagatttttagaagttccattcaccactgaatctgtcggtttcttcccaatgcccattcaatgttcattcatagctcatctctgcaacagcaactcatatgtcttcattcatttcttcccttttagcctcagacttaggttacaattatagaaaagtatcctctcacatgacgagataacagtgatagaataaccatatcagtatatcatataatagttacataaaatcctacacgctctgaggaatagctttatacaactttagcattccacaaattgttccaaaaggtaagtttaattataaaaattctcaaaatgtcacactacatccaaaaacacaaattaataagtgtctattaggtgtcgagtaatgtgccctgtcagcatcgagggtacagaaaggacagacacaccttcagtccatatcttcttaaagtttatagtatactttgtggaggcgttgacattaaacaactaattacattgttttaacttgctttttagccaattttctcaaaaaagaaaacaaacatgttctgtgagcaaaagaaaatgaaaattaatgaaaaccagaagagggaaagtaaagaaaatttttctctctgccacctttacttcctttttatttttaacctcagaattctatgctgtgggaaaagtctattttccttacagttttctattttaatagctgccggttagtcttggttgccaatatgggagggaggccataccatggggtcaacagcatttcaaatgagcccagagattttaaaaagtgaaaatatgctaaactcactggaaagagaaactataatttcgctgagtcttctctacacatttactgaacctctttcacgggtatgttgataaaagtttatgcttgcaaccaaactttttaagtgtaccgtatttgaaacttggcaggcagttctagtatattgcagaatcctcagataaacaaatcaagggtaacaaaagcacaccctctgtgtaaatgtggattatggtatcaaacgcctgcacttctctagttttgttcattctttgtatagtctttctacacagcagactttctgtagttttgttatgtctttactttttgctcgtgccatgttccaaagagaagaggggaggatggatgggctcttggtttcatgcagttattcaaaagccgagcttctttccatctaagcagctccactatcccccaggtcctcatagtctttccctggatacactgaataatgttgccaaagcagcagtcatcactatcccagcagcacaagagcctgtgctaacgtctttgcaaatctcacaaactgccaggtctaggatgatgcaatgtactttcattggcctacggagaaggacgatgtcatgaactttggcaacacattttcatgaagttgcaagataccaaatctaattgtcctattaatttcaagaggatattttactaaaatgccaggtaggacctcaacatactacagatttttaaaattcagcacaaacaaatacattgttaagtaaaatacgtgatttagaaataggtactgttggaatggtacgaaaaaatcttaaaaacagtcagacactattcaatcctctcccactgctgatttatgtaggaaggttaaacagctccacgtggcacacgccgaagtcttatttcattctagacacttggtctaccctaaacatacatgtattgtatttctactcccgaaggcagttactgtggaaatatcaagactctactacaccgactcagactgtgggtgtaagaaatatttgacaatgagcggcagcagaaagttgattttccagctaggacaaaataatgtttttcatcaagttccaaagaagaaagataaatctaataaagcatgaaagaactcgatatccaaaaaaagactttctgagctatagaaattacaccgagctatagaaattacaccaattacactaatgattgcttctcgtgtatctaattacacatttgccaaaaagtgagtcagacaagcaataaattagtcttattctcaatgtttttctttcagtcactaccagctttaatattatttattgaaatggttattttgttgaatgagtgaaagaatatgatattttctcattattactaataattacaacataaacagtgagtgcttactatggccggactgttccaggtgcttcatgtggactgacccctttaatctattcaaccatcctatgaataccaagactttcaccctatagatatcacaagtttggtggacacaaaataaaatgtttgatcgacttttaaataaaatataagccgggggaggaacaacagtggcaaaacatgctttccaaaagtagtggttccccagacaggaagggaacttctgaaaggagaaccagggtgagcagggcaggaatactaaagcacaggggagagaaggctcagactcaataggtgagtagcgatgaaaaaaaaaaaaaagacaaaaagaatttgaaggaaaagagacaagcagatccattattacagatctaccattactacggattatccattatcacggatctacccactcaacaatgtacttagaggtcccagactgaacaataaggcaaacataaatagatggataaagaattgtcatggaagaaataaaattggcattattaacaaacaaaagaatctacagataaaggaataaatgttctaagtgcacaatactgcagtaacatgaggcatttctatgtatcagctctgctttgccttccactgtaagtggaagcgtcctgagaccctcatcaagagcagatgttggcaccatgcttcttgtacagtctgcagaactgtgagccaaataaatttttctttataaattacccatcctcaactattcctttgtagcaacacaaaacaaagataacccgcaaccccattcttaagtagcaaatatttaaaaatcattttctcaacacctaggaaaaacactagtgaaagatatgcaagatctataagagaaaattagaaagtgttactgggagaaactgaaaacctaactaaatagaaagagtcaccacacttgtgaattataagactcagtattgtaaagatattcattctcaccaaattaaactatgaattcaatgcaataatcatcaaaatgccaacagatttttctgcaaataagacactgtggtactgacatagcgacagaacaacagaaaagagcagacggtccagaaacagtcccatacgaaacatatgaagaagtactcaacctcattagtcatctggggatccaaatttaaaaccaatgagataccactacagcccccaaagtggcttcaaaaacaaaaagcaaagacaagccccaccataccaagggctagcaagaatgtgtgtgtggaacagcaacgactgtcatacactgatcgtggcaatacaaaccgcaacaatacccaattacccagtgctatggtttggatatggggagccttttggccccactaagtctcatgttgaaatgttggaggtggggcctgttgggaggtgtgtgggtcatgcggacagatccctcgtgaatggttggtgccattctctagagagtgagttctcactcttagctcccatgaaagctggttaatgaaaggagcctgacacctctcctctctctttcttgctccttctctcaccataggacacgcatatgccagctccgctttgccttccactgaaagtggaagcgtcctgagaccctcatcaagagcagatgttggcaccatgcttcttgtacggtctgcagaactgtgagccaaacaaatttttctttataaattactcaccctcgactattcctttgtagcaacacaaaacaaagataccccgcaactccattcttacatcataccttaagaaaatacatatacaaagagttgaatgaaaatcctatttcccaacatttccattccttagtatatacccaacagaaacacatacacattcaggcaaagacctgtacaggactgctaacagcagtggcattaccaaagtggtcaaaaatcagaaatggtaaaaatgtccatcgacagttgaatagataaattgttctatgcttacagaatagaatactgtttggtaacaaaaatgaattaatctagtaacaacataaatgaatcatataatttgagcaagagaagaaagacacaaacaaaatacatcctgcatggttccatttaaagaaacttccaagaacatggctgagcatggtggctcatgccatcccagcactttgggaggccgaggtgggcggatcacttgaggtcaggagtttgagaccagcctggtttacatggcaaaaccccatctctactaaaaatccataaatcagttgggcgtggtgatgcgcacctatagtcccagctacctgggagtctgaggcatgagaatcacttgaacccagggggcagagggtgcagtgagctgagattgcatcattgcactccagcctgggtaacagagtgagatgtcgtctcaaaaaaaaaaaggaaaaaaagaaacttccaagaacaggcaaaccacccataaactttaaagtgagccgagtgatttacttaggaagtagagtttgaagtaaaggagcaagaagatgggggagaggagggtacattttggggttctgcaggaatttttttaaaatgccatgaaataaaagtatgtgaacatacatgattaaaagaacatactgaatatctgggaaaactgatactaaacagtcaacactgagaaatattttttaagaatcagaaattttaaaaaacattctttaaacatcaagacaaaaacacttataaaggaaagaaagttatattgacaccatacttacgaacactttataccagaagctgaagaagtatgatacttaagatattcaaaacaagaagctatgaaccaaggattttaactttagacaaactgatcttcaactattaatgtaaagaccacaagaaaaacttgtaagagctcagggaaaattgctccctgagccctctccatgggagagcaactaggggatgaatttctgaaataatcagagaagcttttggataagaaatgatagttaccatcaatatactgtatttaactaaagttaaacaatggggcagagtaaaaagtagaatgcagcttttttagaatctagcaatgcaggtcaaatacaactaccaaaaattaggaagagaagggaaataatatatgtaaagtaaataagttcattgattacctttaattgggagttttaaaaaagtatatagtagtttaaattagaagttgggaagagcagggtaaaggaattcctattggtcactgttaggaaccaatacagtatttaacaagagattctagaattgagaatcacttgaacccagggggcagagggtgcagtgagctgagattgcatcactgcaattctcaattctagaaatctaccttaaaatatacaggggcaggaaatgtgtaaaataagcctgagagaccctgtcaggccaaaaagcaaagaagcaatcaaagcccagtgcagttgggtcaaaaacaaaacaaaacaaaacaaaacaaaacaaaacacaggagtcaacttgaaggcactcccaatggccaaagctggggtcattttagcatcaaaaagaataataattgcactggctgggcatggtggctcacgcctgtatccccagcactttgggaggctgaggtgggtggatcacaaggccaggagtttgagaccagcctgaccaacatggtgaaacccatctctattaaaaataaaaataaaaaattagccaggtgtcatggcacatgcctgtaatcccagctactagggaggctgaggcaggagaattgctggaactcaggaggcaaaggttgcagtgagctgagattgtgcaactgcactccagcctgagcaacagagcaagactctgtctaaaaaaaaagaaaccatcattctgagcaaactttcgcaaggatagaaaaccaaacaccacatgttctcactcataggtgggaattgaacaatgagaacacttggacacaggacggggaacatcacacagcggagcctgtcgtggggtgggggggtgggggagggatagcattaggagatatatctaatgtaaatgatgagttaatgggtgcagcacaccaacatggcacatgtatacatacgtaacaaacctgcacattgtgcacatgtaccctagaacttaaagtataatttaaaaaaaaaaaagaaagaaaagaaaaaaacaagaataattgcagtggactaaaactcatcaaatatacaaaaatctttgtattcataccgatagtaaaaagagttctggccgggcgcagtggctcacgcctgtaatcccagcactttgggaggccaagcaggcagatcatgaggtcatgagttcgagaccagcctggccaacatagtgaaaccccaactctactaaaaatgcaaaaaaaaaaaaaaaaaaaaaaaattagccaggcatggtggcgcggctgaggcaggagaatcacttgaaacaaggaggcagaggttgtggtgagccaagatcacgccactgcactccagcctgggcaacgcagtgagactccatttcaaaaaaaaaaaaaagagttcttactgattcacttttggagggtgcaagggcaccaaaacaacattgtgaaaattcgtagattaattgttcctatataagctgtatttcaaaataacctaagaattgataaggaaaaattgttctgtacaatgataagaaaatgattaaataaaccatagcataagcggttgatggattacaataatgccactaaaaattatgattacaaagtttagtgattaaagatacggatctcttctctatcctaagttgcactaagatgatttttcaaattaaaaataacagaaatgagacagaagactagagagttcaaaaatttttagaaaaaggaagccaccgcatagaaccagacaaagtggggaattgtttaaaagagacaatttgacccagggaacactgtcatgctggcggatcagggatgccaggcatgcaggtgctgaaaccctaaatactgtgaggggctcctttcccttggctgatccagaatgtcaagcagccagccacctaaggcccaggcagcagattccaggtctctctgatgaaaaaactgaagagccatggagaaaaatggctctttattctgggatttgcaatctctcctcctgtaaccaacagtagctgatttttcatcctttccctctgaagcagagtttttaagttctggcactactgacattttaggctgaatagttctttgttgtgaggggctttcctgtctatcgcaggatgttcagcagcatccctgagctgttctcctagatgccagcagtaccccctcctcaagtcatcaccatcaaagatgcctccagatgttgccaaatgaccaggaaaggcgagaaggaatccaactcagtcgaaaaccactgttctacagagattccacctgtcaccaggccctgctccaacacatagatcttccaatcagctcttttaacaactcactattaaacacaggcagacaaccaagaataagcagacatttgaggaaagcccccacaggataaacaccaagcaggcaaaacaggaaaaaaaaagtcccagagtaaagaaaaattgtgaacaaaatgaggagaattgaaaatgaaaccgaaaccattctactgaatactcatcaacaagcagagtagcatgatagtaaaaatgtagaacttgagtcagaccacctgggttcaagaccagctctaccacctaactggctgtgtaatcaaagtggtacctcattcttctaatctttacaatggggtaaagattaatatctatctaaagggttgctggaagagagaaacaaggtacttagaactttgaaaagttcatggaacacagaatcaacaaaaagggggcttttgttttgtttaattatcctcagaaagattctatagtgtatccatggaatgagactaagatgttacaaaaaagaaacagagacattcttctcaaatgtactggaattaaaatagcagcagcgaatttttaagattttaaagagaaatgtagtaaaagttgaagaaatctctttaaaagcaaaggtaaaatccagaaaggccaatattcacctaaaagaacttctagaaagatggaagaggagaagagctgagggaaggaaattatcaagaaattaaagctgaagaacagatgtctccaggactgaaaaggtccattggatccaaccattacaacgactggggtgcagataaagaactccttgcaaccccacactaacctcatcactgtgaaatttctcctccaacacactcacactggttaattcttcagcaactttcagatcttatttaactagatcagtgatcagttcttcaataaaacttcccagaatcttggaaaatacccccttctctgccccttatacactcaaagcaccaaaaacctgtccctatctcagtaataattacacacttactcaagtgattacttgagtgttgattccaagagtcatatggtttaagaccaccgtgtctgtttttcaccattgcatccccatcatctaacacaatctataataactatttaaatacattttatataaatgagccatataataaaattactgatttcttggaaatatcatacattaataataataaatacctctactacagagtttcacaactcattacatgaaataaaaaaatttcacaagtttttcgtactgctttggcctgaatttgcttcttttatctttaacccatcagtgacagaactaaattctttaagctaggtctcagatgtcccgaaggaatgagcaccacctagtggaggcacataatattaaaaagtggcttgaaacactacctaaatttactaggcacacaatagtggctagccaaatatttattcaaattaaaagacaaagatacatgccaactttgtcaagtaatgaaaatcaaatttttaccatctgtataatttataacattccaatttaaacaaatgaaattcacaaataaaatgtatttttaaagttggcagttaacatcctttcatttagcttttaactgaacacagaaatgaaaacaatgaggaagaaagcaattctagatgctatgcttccaaagtgagaaagaaaataaaggtacaattaaaacactaattgcatatgaaaatacaccatttgatacactcaagcctttcaaaaaaaataggaaagttttttatcagaagggagggggtgtattatactttgatattgatagccctcgcttgctaagcaaaaataattgtgaaatgtagtaatgaaacaggggactctaagaacaatgtagatacatttgtcttctagttttattagtgatgaaaggaaacacaaatcaaaagtatccaggatagcacactcctgggttaatatattaatattaaactggaataatcaagtaaaacagggacatcttacaagacatatcaccctttctcaagccttgccacagtggttgcagaggggagatgcatgtctatcaaagaagaaaatgtaaaaattaccaagttttgacaagaaaatgaatatgaactttctacagcgcaactgttagatcaatagcaactacctaaaagtaattagcctcatgcaatgttaataactatttattttaatttctacatcactaagccatatttgaaaaatatatttgaaatgtaatatagtgaaaatacttgttaaaattaagttataaataatattgtggtaataagcaatgcctaaaccttagcagcatataacaacgaaagtttatattcccccagacactctctgtctactgcatttcctctgtgaactctgctccacaagcccacgtgctcagacccaggtggggagaactcccaccacctggaacatcagcagtcagcaatgggggctggagggtaggaagaagagacagagtgcactgactgctaaaggcttctgcccagcggtgacacacttcactcccactcacattctattgactaaacaagtcatgtggccataactaacatcaagaggtggagaagtgcaatcttacatgtacctgtaaacagcactactgcaggatatacggatggatggatggatgaatggatggacccatgggtgggtagataaatataaaataattttttgattcagaatggatcacctgcaactaattttacatatacagaagcttattaattttacttttaggttctttataataaattagatttacattaatgtcttatagaattataataaagtattttaaataacattttgaaacatttaaaaatactcaattttaaaatgttaaagatttaaagtattttacgtgaaaatggaaagaatgataaaaccaatctaattcagtaatttcctttgatagtctattattgttaaaccgtgatcatcatagaacattcctaattcctattttattgacatgcagaaatatcaacaataaacttcattttaaaccaggtggataaaaatatctttctttattaactatcatctgtctgtaataaagatgatgcaacttatgccacaacttgagctgactgaaaaatcaaactacattcatcaattatttgtgaataaccataatacttcaataaatgaatccaatgagatgtgagcatctattatcgtgccccacgatgggcactcaagtatttgtgaaatgaatggaaaacaaactgggcaagacagagcctggaagggcaagttattcagtttcctttaatcaggcaatctcccttgaacacctactacgctttgaggtaacgcagaataaacaaacaaaaaaaacactatacacagattctgcctgaaaagaactttactcaatgaacaactatacccataattagactaggtgctaaaaatacattctatagatgcttacaaccaaatgagaatattagatcagttcaaacagtcccagaggaccccgctagagccagcacataaaaataaaccagacctcagacttggccaggagctacataaacctccgactcatacatgctttcagtaagacccagtgagctaataaggattttgtgttaaatggtgagtctgtgaagatgcctttgcttctgcatttaagacagagagaagactttctgcatggatgtatgttttaacacttatgataaattatcggaaagagtggagtgagcccagaccaggagataatttacaatacatataaacaaagatccagcatcagaatgtacaaaataattcctacgaatcaactagaaaaagacaaataaccaaagcaaaaaaaatagcaaaggatataaaaaggaaactggaatgactcaaacatatgttcaacccctaatattcaaataaatataaactaaaacaaggagatattatggtatttcaaattgatcctgttggtaagtattttaattaatggtctggattggaagttggcaaaaattaaagtctaacaattcaaaatgctgaaataaatgtgaagtaattggaactcctggattataatatgatacaatccgttagaaaagtaatttggcaatatctactaaagtgtaagatgtatatatttatggtccagcaactccattcttaggtacgttacttacagaagggactgcatgtgtgtacaaggggaatccacacaaaagttatctcctatactgttcccaatagtgacatggagataaagatgatttccagacatatgactcttgtactcacaagccaactttcaatacaaatattcatcaacatgagaatagatgatttgttatctagtcacataatgccatagatagcaatgtaaacaaatgaattagacctatttatatcaccataaatacaataaatttcattaacaaaatgttaagcaaaagagcaaattgagccgggtgcagtggctcacgcctgtaatcccaccactttgggaggccaaggcgggtggatcacctgaggtcaggagttcgagaccatcctgaccaacatggagaaaccccatctctactaaaaatacaaaaatcagccgggcgtgatggcgcatgcctataatcccagctattcaggaggctgaggcaagagaatcgcttgaacctgggaggtggaggttacggtgagccaagatcacgccattgcattccagcctgggcaacaagagcgaaacgccatctcaaacaaacaaacaaaaaaagagcaagttgaggaaagaggaatgtgtcatgtaaatatgattctatttataagagttttaaaacagacgaaataatatctcacattgtgaatacaaactcaagatgaaggttatcactggcaggaaaaggaaaagaatgggaacaggagggatgttcagacttcaactggatctacaatattttctctcttaagctgtgtgttggaacacatggatgttcagtatattgttctcatttttaatgcccaaaatatttcataacattttaagggaaagaaaagttagaaaacacacttagccaactcaagaactttttaaagatttctaatcacagactattaattttcactgtaattttaaaagagtgagagcaaagaaataaaaaagccagaagaaaagtttattaagaggccaggtgtggtggctcatggctgtaatcccaacactttgggaagctgaggcaggagggctgctgagcccaggagttcaggagcagcttgggcaacatagcaagacctcatctcagcaaaaaataaagaattagctgggcacagtattgtgcacttgtagtcctagctacttggaaagctgagaagggaggatcattgagcccaaaaggttgaggctgcagtggcctataatcaatcgctccacagcactccaggctggataacagagcaagaatctatctcaaaaaaaaacaagtttgttaagacaagaaactatcatcctgaaaaagcagcaatgtagccaaagggatactgaaaatggtgcaaatcctggcgtatagcatggaacacagctaacagaaagaaagaaattgaggatgaggatgatgataatgatggtgacttaatatgttccagacaatatttaaagcacatttcatctatcaattcttttgatccttataacaaccacacaaagtaggtactattattatcgtcattttacactaatatataaggaaagtgaggcactgtgaagtaaaataagaagatatttatatataaagacaatatattaagatatatatcttacatataaagatatattatcttagtatatattaagatctatgtctttatatatcaaaatatatatatctttatatgttaaatatacctttatcttaacatattattataaaatacatattagatatattccatcatgttaagatatatatcttacatataaaaatatatttatacattaaaatatatatctttacatattaaatgtatctttatcttaatatattattatgatatatatcacaagatattattaatatattacaatattaatatattaagatactatcttgatcaggcatggtggctcatgcctgtaattccagcactttgagaggccgaggtgggcagatcacttgaggtcaggagtttgagaccaggctggccaacatggtgaaactctgtctctactaaaaatacagaaattatctgggcgttgtaggggcatctgtaatcccagctactcggtaggctgacacgtaagaatcacttgaacctgggaggcagaggttgcagtaagcagagatcatgccactgcactccagcctgggtgatagagtgagactctgtctccaaaatgaaaagatattatcctaatatatagtaatataattaatatatatcattaatatattatttatatatagatattatcttaatatatattaatattacatattaatatattaaggtaaacatatctatttattttaacttaatatattatgatttttatgattttttataatgtaatataaaataagttctttcaaattattataagttattatattgttatatatcataatgtaataatataatatatttatcttaatatattatttattaattgatatattaatatgtaattattatatcatatatagtatttataatcataaatatatcattggccaggtacagtggtttatgcctgtaatcccagcactttgggaggctgaggcaggtggatcacttaaggtcaggagttcgagaccagcctatattatatattttttaataatgtaattattatgatgaaaataagttataaattattatgttgttatatgatataatatagtataatatgatatattaagataaatataattgtatattgttacattattatgataataatataagttattatcttattcttggcacagccagaacctgagtccaagcaatgtggctcacaatgccagctctgaattctgactacagttgcctctttgcaaaagggtgggacatgagtttctggaagcacagaaaagtactcaatatacctgactgtccataactgagacaacacaaaagggtgaatagacagactcaatgagaagcaaatgatcactagactcaaaagaaaacaggatgcagacagcaaaaggtcccaatttgatgtgaaggaatcatggaagtcgttgtcctctctctagaaattacctgtctccttcagccatacattattacactcacacatccaatcatttaatgattattaaccaaaggcctaaagttccaaactacacttcagtgaatattatccagtccctccactccaaatcaagcagagtttacacaaaaagtgtgctcgtaattcttatttttttcttagatcttcaaacacatgctctagaaatataattaaatgtggtggtgaataggcctccaagccagcccacaaaaacatgtttaaatctatcatgtgaaattccatgctgacactaagttttccttatgcagaatgtgtattcctgtatacctttttacacaaccacaagaagtgtgaactagcctccacacagccttgacacagcagatcccacagcactcccttgttcaatttgagttattcgtcctgtcatttccaaagctctgatagtcactttcatgctgacttccatcagaagcatacagtattggccgggagtggtgactcacgcctataatctcagcactctgggaggctaaggcaggtggatcacttaggccaaaagttcgagaccagcctggccaaaatggtgaagccctgtctctactaaaaatacaaaaattagctggccatggtggcaggcgcctgtagtcccagctactcaggaggctgaggcaggagaatcgcttgaacccaggaggtggaggttgcagtgggctgagatcgcaccactgcactccagcctgggtgacagagcaagactccatctcagaaaaaaaaaaaagagaaagaaagagagagagagagaaaacagcctattttgaaattattataattcagttctatactttaaaaataatttactttaaataaaataaaacaaggatagcctccaaggaagttgtagatggcaagaactgtgacgttttaaaatcattttactatagatgaaaacaaacattggaggtttatttgctgccaatggttctacaatttgctgtgggaaatggactttgagaaccaactgggaatgtcaggaccacactgcactgcccaacacctttgtggcaataggacgtgaagtgccacctgtcatggcattaaagccagatatccaaaaatagcacaatccagaaatgcgggtgataaagggagatgacccaaggtcccagaattgtaaatatacatttcactgagccagtcaattcacttagtagagcaatttggttaagacctactgcagtgggaaacgctcatctctgtagcccagagactccactgttaggtataatacctagagaagctagatgtttccctactggaattcctatcctctggaattagagaacagcaggaattgcccaaaaagggaaataagtgttacaaatttcctgattccatacattctaatgaatgaactgttcttaagtcagagatttctaggtaagaaactccccacattcattctggtagagcatatagacttcctattacgaaattatgaataaatataagacggttgttctgaaactaagtatatttgaatcaccatgtaaatctcacaataacttgactgttacattacataaatgtagaccacgcgggagggcacagtcgcactaaatattcacaaatatggctcccaatttctcatccttactctcaaggaaatctctgaaaagggcaacatatggccaccatttttagagtatgaattacaaaggcaacaatttactcagggtctcaggaattcttcagcagactttacatgtttctgtgcctgaaaaaatgtaaactataacgtaagaaataacttcatctggcttttccaacagagctggcctgacaattacctttgattggccaaggagcgttaccagctgctgctacccaagtctccgctctgtcagaccaggtggccatggatcattcgcaatgtctggctgtctttttgtttttcctcccacccaaagcaaatgatatgtcagaggcaagtaacgtaacctccccaatgggtttactctctaaacttaataccacctctcccttccccaaacagcactgtttctaaaagggcctattccatgagtatcttataaaatattaatagttcttcagccttgaatctgattcactaatatgtaaatatctccttttgcccgcaagtatgatgctttttgttgcttctagattaaaaggtgaggaacttaaaagtgcttgaaccaaaaagagtttataaaaccattcctcaataaaattatccctctttttaaaataccttgactggatcgattatcctggaaataactactttctatgcaaatctcatagtgctaattttagtaagaaaatctgagttattgaaagatgaagatcaagaattaccttcaaactggtttttcactttctgaaatttccaggttggagaaataaaacttcaaaagtatattcttgttcacaggttgctctatgagcctctgttcaggatttatttagactcaagattaagaagatttttccctttgagaattcaacctaaattcatgagcattaatttcactttacgaattcatattaatatggagattcaaaataaactcccaccaagtgtcatctctcatacttcacttctcctaggtgactaatatgcccgcgacttcataggtttcattaaaaacaagacttcagggcatttttaagaagataaattgtatattttgaattaaaaattactcttgatattaaatagtgggcattccttttaaattatagctaataaaactaggaatttatcttacctgaaaaaagtgttcatctttattaaggtaaaggggtaggcaattaagaggttatcatggcacttccaagtcgcatgatatgtactcctgtgcttataataggctaatagacaaaggacttttccatttgtaggggaaaagaaaaaagattaatcataacattatcatgagatcatctactgaggaatatggaggcctctgataaggcttccatgtctttgagtgaaaaggaccaaaatagtaagcaaagtttaccttagttgaatttgtaaagttttcaagttcagaagtaaagcccattgaagactactgctagagagcaaacatcttgaaagaagcttgagggaaaaaatactttacctctagaggacaaggataagaattacttcaggcttctcatcagaaaccacgcaagcaaaaagagagtggactgaaatattttaagtgttgacggaaaaaaaaaatgccagtctggacttccgtatctaatggaattacacttcaaaagtgaaggagaaataaaaactttttcagacaaacaaaaactcaaggaatttgcaaccagtagacctgccttgcaagaagtgttaaaaaggaagtttgtcagagagaaagaaaatcatgtaggtcagaccctcggatctacacaaaaaaaaggaaggacatcagagaaaaaataaataaatataaagcaaaatattttatttgttttattcttaattgatctaatagataactgttcagagtaataatattagcaaagtactgggggattacattagcatagagataagtaaaatgaatgacagaaatgttataagagataggaaaaagggaattgagaatactctgttataaggtacctgtactacctgtgaaatgacagtgttatctgaaaatagacctaggtcaggcatggtggcttatgcctgtaatcccagcactttgggaggctaaggcgggaggatcacttgagcccaggagtttgagaccagcctaagcaacacagcaaaaccctgtctctacaaaaaaatacaaaaaaaaagttagctgggcatggtggcgcacgcctgtacttccagctacttgggaggttgagaagtgggagaaatacttcagcctgggaaatcagggctgcaatgagccaagataacaccactgcacaccagccagggagacagagcaagaccctgtctcaaaaaaaaaaaaaaaaaaaaaaaaaaaaacctgtatttgttgtaaatgtgtgttgctaactgtagggcaagcacacatagaaaaaaaaaattaagtataattgatttgataaaagaagagagtaaatggaataatataaaatggtcaactaaaagcagagaaggaaggaaaagacaggataattaaaatcttagaaactaacaagtgcagtgaacagaaatcagttgtaaatatggtaaatattaaccaactatatcaacagacacttcaaatgtgaatgatctaaatataccaattaaaaaacagagactgtcagaatggataaaaagaaagacccaactcccaactatatgttgtctataaaaaactcacattgaacataaagatacagacacacgaaaagaaaaaagtagagaaagatacactaacattaacccaaaaaagatggagtacatatgtcaattcccaacatggcaaattggcagaactagaaaaaattatcagagataaaggtattacataatgaaaagggcatcaattccccaagaagacataacaatcctaaatgtgtatgcacctaaaaagaaagcatcaaaagacataaagcaaaactgataaaactacagagaaatgcatgaagtcactattatacttggaacttcaacacccgctatcagtcagtaattgacagatccggcaggcaaaaaaaaaaatctgtaaggatatagttgaactgagcagcacaatctaccaaccaaatctaactgacatttatggaatactttatccaattatggcagtatacacattcttctcaagctcacatagaccattcagcaagatagaccacatcctgggccattaaacacaacttaaatctaaacgaacaaaaaccatacagcatgtgctttcagaccacatggaattaaactagaaatcagtaacagaaagacagcaggaaaatctctaaatatttggaaattggacaacattttaaataacacatgggtcaaagaagaattctcaagaatattttaaattaagtggaaatgaaaatacaacttactaaaacttgtgagatgctgcaaaagcagtggttagaatttataccactgaaagaatacattcaaaagaaagaaaaatctaaaattgataatctaactttccaacctttggaaaccagaaaaagaagagcaagtagaagaaaagaaatcagacaataagagcaaaaattaatgaaactggaacaaaaaaaaacagagaaaaatcaacaaaatcaaaagcaagttcttttaaatgattaataaaattgataaatctatagccagggaaaaaagagataagatacaaattacgaatatcagaaatgaaagaggagtcaacagtactgatgccaaggacaataaaaggacaataaagaattgtgatgaacaattctatgccctcaaatttgataagttagatgatatacaccattccttgaaagacaagagtgacaaaatctcacaaaaggagaaacacaaatctgaataagcctatatttatgaaataaattgaatcaataactagttaacttacaaaacagcaagcaccaggtccagatggcttcactggtgaattctacaaaacacttaagggagaaattataccaattctctgcaatctcttccagaaagaaaaggaaaatagcaagcagagtatacttcctacctcattctacgaggccagcattatcttattatcaaaaccagataaagacatgacaaggaaggagaattacagcctaaccgtacttacaaacagagatgcaaaaaaactcaacaaaatattaataagttgaacccagcaatagatcaaattaattatatacagattgagcatcccaaatccaaaaacctgaaatccaaaatgctctgaaatctgaaatgctccaaaatctgatactttttgagtgctgacaaggacatgatgctcaaagaaatgctcactggagcactttgagattctggactttcaaatcagggatgcttaactagttaaaaatctgcaaatgtcccaaaattcaaaacaatctaaaatctaaaacacttctttcagatcacaagccttttggataaggaatcctcaaccaataccacgaccaaataagactcattccaggtctgcaaaatctagttaaacattcataagtaaattaatgtaatctatcacatcaatatgctaaacaagaaaatcatatgatcatatcaacagaagcaaaaatatttttaaggctgggtgcagtggttcacgcctataatcccagcactttgggaagccaaggcaggtggatcacttgagatcaggagttcaagaccagcctgaccaacatgatgaaaccttatctctactaaaaatacaaaaattagccaggcgtagtgacgcacacctgtaatcccagctacttgagaagctgaggcacgagaatcgcttgaaccccagaggcagcctgggtgacaaagtaagactctgcctttaaaaaaaaaaaaatcagtacccattcacaataaaaactctgagcaaactggaaatagaaagaactttctcaacttgatgaagaacatgtataaaatacctacagctaaaatcatacttaattttccctaagatcagtataaagaaaagatgtctgttttcaccacagctattcaacactatatgagaattcctagctaatgctataagacaaaaaaagatatatacagattgagaacaaataaacaaaactgtctttgtttacagatgagaaaatcccaaagaatcaacaacagcaaaagaccttggccacaagcaaacgattatagcaaggatgcaagacagaagcttaacatccaaaaatcaattgctttcctgtataccagtgctgaacagctgaaacttgaaattaaaaatataataccactccaaagccatagcaccaaaaataataaaacatttaggtataaatctaacaaaatatagtgtgcagagaatctaaataaggaaaacacaaactctggtaaaagaaatcaaacaagatctcaataaattgaggaatattccatgttcatggtcaggaatacacaatattactaagatgtcatctcttcacaaatggagccatagaatacacagtcccaatcaaaatcccagcagattattttgtggatatgacaaactgattataaagtttatatgacaaggcaaaagattcagaatagtcaacacagtatcaaagaagaacaaagtctgagggctgacgctaccctacttcaaaactaactataaagctaaggtaatcaaggcagcatgtgttgatgaaagtataaacaaatagataatggaacacaattacccaaaaatagacccacagatatagaagctaatctttgacaaaggatcaaaggcaattcaatagaaaaagaatggtcttttcaacaattgatgctaaaacaattggatattcatatgcagacattttaatctagacatagaactcaaggtggacaatagagctaaatgtaaacgcaaaactgtaaaacttctaggagataacacaagaatatctaagtgaccttgagtttgacaatgagtttttttgggtttttttgtttggttggttttttgtttttttttttttttgagacggagtctcgctctgtcgcccaggctggagtgcagtggcacgatcccagctcactgcaagctctgcctctcgggttcagaccattctcctgcctcagcctcccgagtagctgggactacaggcgcccgtcaccactgctggctaattttttatgtttttagtggagacggggtttcaccatgttagccagatggtctcaatctcctgacctcatgatccgcccgcctcggcctcccaaagtgccgggattacaggcgtgagtcaccatgactggcctgacaatgagtttttagatataattccaaaagcacaatccatgaaagaaaaaatctgtaagttagactttagtaaaatgtggaacttctgctttgtgagagacaccactaagacaatgaaaagacaaactgggagaaaatatttgcaaatacatatctgataaaagacttgcatctagaaaatacaaagaattgttaaagctcaacaacaggaatataaaaataaaaataagcaaaaaatctgaatagacacctcagcaaagaagatgtatagataaaaaataaacgtgtgaagatatgcttaacctaccatgtgcaaattgacacaataatgagatactactatacaccaactagaatggctaaaattaaaaaaaaaaaaaaaatgaccacaccaaacgctgacaaggctatagagctacagggactctcactcattgctggtaggaattcaacatggtacagtcaccttaaaagacaatatggcagcttctttttgtttgtttgtttttgaaatgtttttgaaacagagtctcactctgtcacccaggctggagtgcagtgacacaatctcaactcactgcaacctccgcctcctggattcaagcgattcttctgcctcagcttctcaagtagctgggactacaggcgcgtgccaccacacctggctagttttttgtatttctagtagagatagggtttcaccatgttggccagaatggtctcgaactccagacctggtgatccacccgcctcggcctcccaaagtgctgggattacaggcatgagccaccacacctggccagcagtttcttaaaaagctagtcttaccacatgatccagtaactgtgctccgtgatatttatccaaatgagttgcaaacttacatctacacaaaaacctgcacacaaatgtttatagaaagtttacctgtaactgctcaaaactggaagcaatgaacatgcccttcaaaaggttaatggagaaacaaactatggtgcttatctacaactaaatcctattcagcaatacaaagtaaagaaatgggctatgttgccatgagaagacttgatggagccctaaatgcatattactaggtaaaagaagccaatctgaaaaggctacatactgtattattccaacaatatgaccttctggaaaaggcaaaactattcagacagtaaaactatcagtgattgctgagctggggagggaggacaggtaaagcatgggagatttggaaacgtaaaactattcttcatgacaatgtaataatagatgcaagacataatgcatttgtcaaaacctggaagtatacaacacaaagaataaaccttaatgtagataatggagttcaattaataataatgtatcaaccaacattggttcgttaattgacaaatgtaccatgccaatgcaagaggtaaataataagagaaactgggaaggggagaagggggatatgggagctatctgtaccatctgctcaatttttctgtaaatccaaaacagttctacaaagtaaagtttattaattaaaaagaatccaatgggagaaatgatgggcaaaggatccaattggacatttctccaaagaagacatacaaatagccaataagcacatgaaaagatggttaacattatttagacatctagaaaatgcaaatcaaaatcacaatgaggtaccacttcatacccaccaggacagtaagaatcaaaaagtcagataaaaacaaatgttggtgaagatacagacaaatcagaacccttatacactgctggtgggaatataaaatggttcagccacttagaaaaatagtctaacaggtcttcataaaaacttagagctaccatttaacctagcaattcctctcctagatacatacccaggagaagtgaaaatatacatctatgcaataacttatacacaaatgttcttagtagcatcaccataacagccaataggcagaaacaacccaaatgtccatccatggatgaaaggatgaacgaagtgtgatatagccatacaatgttattcagtcataaaaaggaattaagtactgatacatgctataatttgggtgagccttgaaaacattaagctaagtgacagaagtcagttacaaaaaagccacagatgatgccatttatatgaaatttccaggataggcaaatacatagagacagaaagtagactggcagttgtttagggatgggatgggagagagaatgcaaggattgaagaatgatggctaggggtgaaggatttatttttgaggtgataaaaaggttctaaaactgattgtggggataggaaaagaacaaaataaacaaaataaataaaattgattttggcaatggttgcacaatcctgtgaatatactaaaaaccactgaattgtatgttttaagtgggtgatttgacagtaggtgaattatatagctcaacaaatctgttcccaaaagaatgttaccttctaaacgttgatgactcccaaataagagctgtcagatttcagtaatgaaaatacaaatattgcatggttcacacttataacaaagaccattcattgcatatctgaaattcaactgtaagaggatgtcctgcattttatctggcacccctactcccaaatctattctgtccaatccagaacataattatcctcagttcaatattcacatatccaggccagatgcggtggctcatgcctgtaatcccagcactttgggaggccaaggcaggtggatcacccaaggtcaggagttcaagaccaccctggccaacatggtggaacccatctccactaaaagtataaaaattagctgggcgtgggggcaggtgcctgtaattgcagctacacgggaggctgaggcaggagactcccttgaacccaggaggcagaggttgcagtgagccgagatcacactactgcactccagcctgggtgacacagcgagactccatctcgaaaaaaaaaaaaaaaagattcacacatccaataagtagctctatttgattatgccccagatatcaaacataaccaaaactaaaattacctctcatctcctctgaggagatggtcaaaatatataagaactggtacctggtattggtatcttagggcttatacaggtctcctggtatcctcttccaacccgcaatggcctggcataaacaatagttggtggcttacaacaggagagtttcatatttcaatgaagagcccacaggcagatgagagcacactgaacatcagcctccctctctcaaactaaaatcagtggctcttccaacactttgccaccatcatctctgacctgggaatctcatgtcccatccagtcttcactgtttacctctaaaagaaaaacctgatatcttcactgttcttgaaacctttccatgcaatggttcccactctcttagaagaaagcccatttaccttctgtcgtttacaaagctattcaagaacaggtcactgttcatctctcctgccacccttggctgcccacagccttcctggtgtcacagatcagccaaaacaatctgttgacctcaatcctaaaggtggattgttcgctcttgcctccaggtgttcgcatccattattccttctgcctgacctcccatgccctcatccatcccataaactctaacctgagcaacttcctttttttttttttttttttgagatggaatcttgctctgtcgcccaggctggagtacagtggcacgatctcagctcactgcaacctctgcctcccaggttcaagcaattctcatgcctcagcctcccaagcagctgggattacaagaatgtgccaccatgcctggctaatttttgtatttttagtagagacagggtttcaccattttgaccaggctggtctcgaactgttgacctcaagtgatccacctgcctcagcctcccaaagtgctgggattacaggcatgagccaccacacccagcctaacctgagcaactcctataccgaatgcaggttccaacttaagataccaaatcctccatgaaccgccccctctgaggctagtgttgagtgaggtaccttgtgtctctcctaaaaagctccaaatgaggcctatcttagaatactgtaatcatccatcccttcatttataaactctctgggagactggagcccccacaggcaagggattgtgcccaccaagttgaacatcttggccctagtggtccatatagtaactggcatagagtatgtacccaacaaatagtatcaatcagtccatcaaaactcaaagttaaatagatgcttgaggtgatggataccccatttaccctgatgtgattattatattgcatgctggtatcaaaatatattgtatactccataaaaatatatacctactatgtaacccccaaaattaaaaaatatgcaaagctaaaacaatgtaaccagatgttacaggggtctgagtatttatcattacttgtataaggctgaaatcacagaaacacacacaataattcaatcatatgaggaaaattatctggaaaatatcaatttgggtttgttgaaatacttcaaaataccaaaaagaataaaattcagattgctacattttttcctcctgttcccaaatatacacacaattactttaaagggtaggggtaaacataacacaaccatttaaaaggtactaacaattccatattcttatcctagaaatctaacatagttgtgagttaaaaacaaagatttctggagaaaacagaactacagccttatttaaaagaaatataggccaggcgcagtggctcacacctgtagtcctaacactttgagagtccgaggcaggtggatcccttaggtcaggattcaagaccagcctggccaacatggtgaaaccctgtctctaccaaaaatacaaaaattagccgggactggtgacagacggctgcagtcccagctacttaggaggctgaggcatgagaatcacttgaacctaggaggcagaggttgcagtgggccaagattgcaccattacactccagcctgggcaacagagcaaaactctgtctcagagaatttaaaaaaaaaaaaaagaaagaaagaaatatagtatttaagcaagtttttgtgccatatcttgttctaaaatgaacttaaaccagattacaaaaacacacagaaacataactaaaaaaaataaaatgtaaaataagtaaagagatctcaataggaaaaaagaatccacaagaatagaaactacatctagaaatgaggttgggatacaaaatatatggtcctggatatttgcaagagatgggtcctggatgcagctctacccttgctgatggtctatgccattccctagttcatgtgaattctgatatccttctatttccaccctcataaacaatgtatttccatcccacagatatgtgtatttgtcagttttcacatacctgagactgggtaatttataaagaaaaagagatttaatggactcacagttccatgcggctggggaagcatcacactcatggcagaggcgaaaggcacatcttacatcgtggtaagcaagagaggatgagagccaagcataaggggtttccctttaaaaaaccatcagctcttatgagacttattcactaccatgagaagagtatgagggaaaccaccccccacgattcgattatctcccgcggggtccttcccacaacacatatgaattaagggagctacaattcaagatgagatttggatggggacacagctaaaccatatcaatatgagacttctcaggcattctctcagtatcatcttccctctgatacttctaaagtctcatgctcaccgtttttattattcttcgtttctatttaggcgtttttcttttaaaaagcatcctcagctaacaccctagaggatcaccatatttcctttttagtgacaagctcccagcctacatatacttgcactgtagccagataccccaaggtggctgaatctgtcacagagactgtattactcaaacttcctctttataagtatattttttcctagtccaaagaggtctatgtatttaaaattgtgttgtgatttacaacctgcccccaaactttttttttaagagacagagtctctgtcatccagactggagcatagtagtgtgatctcagctcactgcagccttgacctcccgggctcatgcaatcctcccacatcagactcttgagtggctaggactgcaggcatacactactatgcctggctaatttttaatttttttttgagagagagggtcttgctgtgctgcccagactggtcttgaactcctggcctcggattacaggtgtgaaccactgcactcagcccatttaaacacacacacacacacacacacacacgatcacacgataacaactatgaaaattctgtactagaataaaatcaagttttgtgttcactcagttctaaaccacattctaacagcttcgactgcaggcagaagagcataaaaccaaagcgattttgattcactctaccacaaatcttttcatacaaattccttcagctctaccaagatttacgtacaaaagctgaaggcttctatcctccaagcttaaatagacacgcttggaatacagttaagcggtttgttccagctgtttaaagctccagtcccaggaacctgcctcctgaaagtattgcagactttacatacttgaaaacgaatagaatgggtcagtcaaaggacacacttgaggtctgtgtctgataaaagttgggggtgggaggaactattaagacattgagaatgtactagaggtacgtaataaaactaattttgaaaatacattttacagcaattactggaaaacatttagaatagtacatgtgttattgtgctatctaaatactagcaacatgagtttattcgctccactgtttttatgaaatcagatatcaataccctccgctatgctttctaaccacttagtattgacatatactttgaaaaacagcctcagcttaaaactcaagccagtgtaactaagaatttgttttatgcattagtttcattcttttaatagaaataacaaccatctctgtagttcctttttggtctttagcgtgctacgataattaactttttcctcaatacttaataatgcctacttaaatttgtctaaccccattatataactaccaaaaaactcagatcttcgctattttatttgaaactcacaaacaaccctgtaaacagatattataactttaattttataggtaaggaaactgagatagtagctatttgtaaatacatacaaatgaatatgcatccattgtttggaggcatgcttatttaatgattaaaggatgatgatgacacctcaaatatattttattcctgctatcaaaaggtcaactcaatctaaataaacccatagctatccaacttccacacagtcaacttaaaaatatttttatgattgtattaccaagtcataaacgtcatcagttataatcccaagaccatgcctaataaatccccagagggcaactattatttagagcacaaggatgccttggaaattacactgttatgaaaaaataaagaaatgaacaaataaacatggtctttaaatgtactgctagggaaatgccacatatcaacacttccatttcttaagaattgtcactgctgcaagtacacaaatttcagtaaatttgacaaaagaaatataggaattctgttctgaaaagcaattgcaactcagaaattgctcattttctaatactctatatcaattaaaagcctcttatcatgacaggcagccataacaaagttagctgaatttaaaaatataggtccagttatcattgaggcactggtttctacctcctcataaactccagaaagactctaaatttctttcagcttgagttagatgagagaaaatgcaattcatatttccagaagcacaagtggcatattttccagtaagcttcttgttctcattttactattttaggagttctgatcactcccaatgttgctgtatggccagacccgatttctgctggctgatcattttcatggcatgatgctttactaaaactgtctccaaaaactgtttttactcacattcggcttcagtgtatttatatacaaaataccacttcaatggagttctgccaataaaaggaacagcttactagaatttcagttgactttgttaaaggaaattattttaaattaatgtggctactgaactgctgccatccttgacctcagaaaatagattccttctaatttttgctgtgaacatttatttaagttaaattccagctcatgaatgttgaccgtaaaagagtctaaaccttcctgctactatttcatattctttctctaaacaagggggtgaccacatggttgctacattagtatacagagccagctcaccaccattaagtgaaatcatctatgtatttttggtagaatctttaacaacttccacgcccgtcggtgaatggaacaaggctgttttgttttcagagagcaacaatttgatctctggtttacttggtggtgccccaaatatttttccatatgcttttcgcaaagagaatctgacatcagcatggtttacctttaccaatgaatgcaggcttttttcaccaaacatatcccagaggaaggtcaggtcttcctggctatccacatgtggctgcagctgggctggcagagcagccaacagctcatacagacctataaaatgaaaataaaacacaaagtgtaatcttagagtgatctcattaatttcgcctaaggtgtgtgtaaatgacagctggaacatgccaattttactggatttgtattccgggccatcaagctaaacacttctccaaagaaccaaaggggaattttctggcttttaaattccaaagcagtggtatgtattaacagactcatttttacctctcacagttgtcaacattctacagccctccaagtttacataatccgagacagaaaatgtgtacaggttttcagaaaaagaagaaaacgcatacattcctttccttaatcattattacatttccctcaatctgagccaaagagtgaaatgagttatgaataggaaaaacttccttagaagaacagagaattgatagggtggcccattaaaagggttttgtagtgtccaaatagttcctaataacatatagtttcaaaaatacttgcattatctaacatccaaaagaaagtcctacaaagtacgggaaaagaaatcataaatggttctacattactatagtcaactatcaaaaaaaaaaaagctacgtagaacttagtttaaaattgggggatgtaaagcttatgtaataccctctgaaagagttaaagtaacagatgcgggttactcgtggcgtcctcactagccacttcctaggggcagacagtagtgcagtgttccacggtagcgtactacataaaccatccatctccatcacagcccgtcacactcctgtccaagaaatgttgcaacagtgcctgcccgagactctttagggaggtgacctggcaggagtcaatatcaactcatagcacatgtttcattttccagtgggattacatgaggtaaaaaggacaaaattccttttatttcttgtctgctgtctacaaaaacaccaagacctcctgggacctacaacacatgggactgttgttatttttggtctgaataagtgctgctgttcatcacagggacagctttacaagagatttaactagcaaagaatagtaaattatgggctgatgattcgtatatctattatcttcctgaagcatactaattctgcttatcagtgataacttacaaccaaaggcattaggtaccatattgaaaattaagatacataacttgggagatctgattaaattgaaacatttctggggccttatttggccaaaaaaagctaaaacagtctttaaaaaaaaaaaaaaaaaaaaccttctctcaattacattctgaagtattcttggtattttacatctattcccttaaaatcctggcattctgcctacaccagctcttatttacagtttagtaaaattatttgtaaggtatctcagcctaactcaatctataataatacaggtttcattatatatatgaaagtaatcaacaatggccaagatcagtggttaaggtcggaagtcaaaatgtgaaattatgtaaagaaagggtgaaatttcattattttattattgatttggggagttgtaaaaataattacctattccttggtaacatgacttacagtttaattaaggagactaattcaactgtgacataatttacatgataaaagttgtcaggaggattaaatgactcaataccttagaacagtccctgtcacataaaaagtactcaatacatttcacatgaaactcagtaagtttcagctattgtcataattattactgttattaatcatatcgttacagaaaaagcaaaagtgtggatcaaacacagctagattcaaactcaaagtctacacttagagcatttcacgtaacttaactgagccttatttccctcatgtgtttaaaaacaaatggtaacctacaggtgtggtaaaatcgcatagcacggccaggcataatggctcacgcccataatcccagcactttgggaggccgaggtgggcagatcacttaaggtcagaagttcaagatcagcctggccaacatggtgaaaccccatctctactaaaaatacaaaaattagcccagtgtggtggcacacacctgtaatttcagctactcgggaggctgaggcaggagaatcacttgaaccccggaggtggaggttggagttagccaagaccacaccattgcactccagcttgggcaacagagtgaaactccgtctcaaaaaaaaaaaaaaaaaaatgcatagcactaaatacgcaaacacacggagacacacacaaataagtgcatataaaatgtgaaatctgaaaaggtcaaaggattgtaccaatggcaatttcctaattgcaagactctattataattatgcaagatgctaccatcggaagaaagtagctgaggggtacatgagatcataacatcaatctacaattatctcaaaataaaatgctaacataaaaaaaattatggcaaacacggttgttgtaagaattctatagagcaattcatatggcagcatttagccctgtggctggcacagcgtaggcagtccgttgcttaacatgtcttcttctagaatgaaaatgtcatttcaattcaatggttcaaagtcaaacaatagcttagctgtatattgcaattggatacaataccatactcagaaataaaaccacgctagtcttttacatatggaaagtgttaactttacccaagtactgcttacattttgtgggaataagccatattatatttaagtttttataaaaaataatttttctgttagcagaagctcataaaccagagttctctggtttttactagttttatgtaatcctaactaatatcccaccacagtttggcactctagtaacaagagccgtaccttcccttcaactaccacatctggtaaccatgaccacagcaagaaaagacagcacagtgccaaccagaaattaaagacatgattaaaggagccaccaggccagagccgtgtgcagtctccatgaaggtaaataatatagacaactacttccactcaaatgaattataagggccctagaaaccatctctggccatgcataaaatggggcctgtgttttaacatgttttttaaaatactcctatactcagttcctaaagttctaatggtgaagagttttgtgaaatccaaatggtttgggtcatggagattcaagggcaaatgatgagagtttagatagcagcagatattttttaagaatttacctaaatctacttggtctttgggcaagaactgagacaatgagataccctatactctgtagtcattcaaactcattgattccagtaaacagttatggtagctatgaatgaaacactcctcaaggctctaaagatctaagaaaaatcagtcacagctcctgtcctcaggagttggcagtgcagcagacaagcacagacaggtctattcgtaagtccaggacaaggttagagtgctgcggcaatggcaagggaagtggtcaattcctgcaaaggacgaagaagacatcaggaaagtcttcagaaaagaagtaaacacttgagttaggtctttgctgtggtttgaatgtgtcccctaaaaagcatgtatcagaaacttaaaccccaatgcaagagcgttgggaggtggaggccagtgagaggttatggatagattaatgccattattgtaggagtgggctcattatcttgggaatgggttcattatatgaaggtgagtcagtcttcttctccctctctttgcctttctgccatggatgacacagcaagaaggccctcatcagattctggttcctcgatcttggacttcccagcctccagaactgtgagccaataaaattctgttcattacaaattgcctagtctgtggtattctgttatagcagtacaaaactgactaagaccctctttaaaggcaaagttcctaagaatcaacatttactgagttctcatattcagggtactatgcttgtcactggagatacaacttatagaatatatgactatctctgcccccagaggtcttatcatcttagatgacacagaatatgccccaacataaagcaatcctaaatataaggctctcttatttgcccaagaaaagatccaaaacacattttctttcaaataaatacatgaacatttaatgtgacaatgaaatacatacctaattaattattaacatctgtttatgtctaataattcaaatatctaattgacttttacagatgttgataaaatgctcatgcctgcttctaaaatttacattgcagtttagttaggaacacataccttaaattacctatgaggtaaaatatattaatttagatattaggtttgggccccacttgcatatttcatgaaattgttttatttaaattatttacaataactttgtaaataatttaaatttcagagttaaaatacatcattttcatttctagataagctataagctgtttgagatggagcatatttttgattattcgtgagatgctgtcatgggaaatctacataaaactgatcggtttttcatttgtcctgtaactgtatagtttttatctctacaacagaaccactaagctactctttaagtatctttaacgttggcaaatgtgaggtcacaacctttccctaaggaataataattaaatctggcttaaacttctttgcaacgttttttttctcccattgtcttgatgaatagtgtccttttttaaaaaacaattctgtcaggtggcctctaaaaccatacccaaaaattttgaatttaggttatatgagaacaatgtgccttctccattcaacaaatttttgagtaagtgaaataacagaaagttacctataagagattttgtaagaacttcaatataaagcagctctctcttctctgagaaagaattttaaggaggaaaaaaaatctcaccttatatttgggtacatggaatagacactgtcaaagatgcaggtgaagcatttcaataaaattatttcataaaattctccagtatataaaaagcaatattttttaatttgcatattttataactgaaaaaaaaagaaagcaccacagcaaaactaaaatatgtcaagggtcagttgattgatacgtacaagaactgtaataatttaaagatgagaccaatcattgaaggtcagaaaaggttatattgggggctgggcacagtggctcactcctctcagcactttgggaggccaaggcagaaggattgcttgagttacagaccaacctgggcaacacagtgagaccctgtctatataaaaaatttaagaaattacccgggcatggtggtgcacacctgtagtcccagatactcaggaggctgaggcaggagaatcacttgagcccaggaggtaaaggctgcagtggtgtggtgactataatcacatcactttactccagcctgggcatcagagtgagaccccatctcaaaaagaaaaaaaaaaatgaaaaaagaaagaaaaagaaaaggctatactggaacttgcaggacttgagctaggatctgaaaaaggaaaacagaacctgcaagggtacattctaggttggagaacacccaaggtggaaaggcagttataatcacataaatctatagatttttaagtgcactaaatttccgtaaaactgaagaaaacactagtgatttatcaaaccctaatttctgccttttatgtttgcatcagtcatggtccaacctggagacaggagctctgcagtaatttgaacagagaagcttaatataaataattattacctataacaggggcttatctgtaaagtcagagagaactctaaagaatacctaggactgaaggagattttttcctgttatccaaggagaaaacaaccttggaagaggactccctccccaaggctaagactcagagctcacaggagaacgtgtgtttgcagctcacaagatggttgggttccttgggccaaagattctccattatcattgagcaggcaagaaacacccacctccaggatgcaagtggacaagaaactgtgcctgggactagcaagcaggaaacacttctccagtatacagatggtttgaggctggcaggcaggaaaccatttttagtcctggcatagcaggactaaaaagccagaaatatcctgggggtgtatataacagtgacaggaactgtcaagcaaacaccccctccagtacataggcagggtgaggctaggaagttgacctctgggatgcccacaagactcactgggagtctgcccatgggcgtgtcactaaaactcaaagaggataactaccactggatactcccacaagtgctgttagaaatcctatgaaaggagaaagaaaaagcaaataagaaaacacaagaataaggaagagatgcctccgcctcctcttgcattgtcccatccagtgccctcatctgacaaaacttaacgtcaggccagcagcaaaagagaaatacttaaagggcctagctctatcttcatagtgcagacaatgaagtatgaatttggagctaagaggcaataaaatgataactggctcaatcttctatatggagatttatgtatgtacatatgaggctgatatagtttaggtatgtgtcccctctaagtctcatgttgaattgtaatcccaaattgggacctggtggaaggtgactggatcatgggggtggatccctcatggcttgaagctgtcctcaagacagtgagtgagttgtagtgagacctgtttgtttaagtgtggcacctccccccactcacttcctttgcccctactttcaccatctgatacacctgctccccattcaccttccaccactattgtaagcttcctgaggcctcctcagaagcagatgccagctccatgctcctgtacagcctgcagagccgtgagccaattatacttcttttctttataaattgcccagtcgcaagtattcctctagggcaatgcaaagaacgacccaacacagaggccgaggcaggaatatcgcttgaggccaggagcctgggacaagcctgggcaacttagaaagaaccatcactaccaaaaaaaaattttatgttagctgagcatagtggtgtgcacctctatagcaccagctacttgggaggctgaggagggaggatcctttgagcccaggagttcaaggctgcagtgagctatgattgcaccactgcactccagcctgagtgacagaatgaaatcctatctccaaaaaaaaaaaaaaaactatgtgtgtgtctctttctgggggagaggaatattgtctttctgctttgttttcgatgttctttctgttgtttggcattggagatacaatgaaaaatatttagtgattagtgaaagtaaaggtttttctaatacagatttgaaagggaaatactattacatcaaaggcttgtattgacaatgtttgcctgtcttaacaatatgctaagcctgaccccaacagctcaggtggagcactaggccaaagttctaagttcaacaaatgacaaataaacagtcttgagatggttaattttatgtgttaatttgactgagctaagagatgtccagataggtggtaagacattatttctgggtatgtctgcacggatgtttccgaaagagattatcctttgaattggtagactcaagaaagaagatctgctctcaccaacatgggcagcatcagccaatctcactgagagtccaaatagatccaaaaggcagaggaagggcaaattccccctcactcttattgagctgggacacccatcttctcctgccctcaggtatcaggcttcctggttcttgggcctttgtgctttgatacttacttatactgcagccctttcccttccaccccataatcttggctctcaggccttcagactcagactgagttatgccaccagctttcctggttctccacgttgcagatggcagatcactggacttctcgacctccataatcacgtgagtgaattcccataataaatctcctataaacacacacacctatataagtcagttggtacaaaagtaatcacagtttttactacaatgccaaaaactgcaattacttttgcaccaacctaatatatacctgtctccatgtgtgtacgtatgtgtgtggggatgtatattataatatctcctattggttttgtttatttggagaacccaaacacagctcttttctatcaaaagagcactctcttaatttcaactttctcataaatgtatgaaacttataagagaaggtcaagatagattgtggttttctaacattaaaataacataaaacccctaaacatggaaaaatgatagaaagtacatagtgggcaaaaattttaggggctaagaaaggcgcttaaaattaaaggaactaattgcaaagacacataaagatgttttgagatttttaaacaggttaccaaagcctgctctgtggaaaataaatgttgtaacctattctccctttccagaggaattttatatggcaaattctggctgtatgaaattataaaaagtaatatactaatgagaatgctttcagtacaatataaatacctcactctgtgagccggttcattaagccatctcatatgtaagaccataatcttaatttaactacactgacttatttatttgatgggatttaaatgtgctgtagcgggcttccctctatccacactatactagacgataagtacatgtgccacttactttttgttaaagataaaaactatatgctttgagatcactgagttatttaattggacttaaataatatgccgtgatcatcttcctgaacccatgctacactgcaggagaaacatatgtcactgtctcactgtcttttcttttttttttagatgaggtctcactctgtcacccaggctagagtgcagtggcacggtcacagctcactgcaaccttgaacccctgggctcaaaggaccgtctcacctcagcctccctagtagctgggactacaggagtacaccactgcacctggtatcattgtccttacagataaaggtatatgtgcttttcccctctaacgacttacaatcagggtatgttcttggggctttagtagccctgggcaacacactgagatggtatgtattttacacacacttttagatactctgatgctttgagcaacttcaagttgtcttgcagtatattttttgccatatatatatatatatatagagagagagagagaattactgtaaaactaaagtcatgttttctatcagaatattatctttatataagatatatataactaacaggcaggtgagttgaccaaggattggggaagatagacaacctgacctatctcataaggaaatgtattcacattgagtaaacaattcacccaaagttataattcattaatcagaagataattacaagctgtcatcatttcgaattaataagattgcattatcttttaagagtatataaaccaccagagtacatcagaatacttttaactgaggaagatgacgggcaaggagtcccatatgacaggagcagagggagcaagaagaagaggggatataaggaaggatatgggagcccagatcacacagggcctgaaagggcaaacacgagaaggagcttcacttttactttagagtgaaagagccactgcagagttttgtgtaaaggggtgattagatctaacttacattacaaaagcatcactcagccaggcgcagtggctcgcctataatcccagcactatgggaggctgaggcaggaggatcatgtgagcccaggagatctaggctgtagtgagccatgattgcaccactgctctctggcctgggcaacagaatgagaccctgtctcgtaaaaaaaaaaaaataaatgagtgaatgaatgcatcactctggctgctgaattgagaacagatcgcaggaagccgagggccgaggcagacaactatatgggaagatcaaacacagcaatccagggcagaaggtgagggtggcttgggcccatgcagtagccaggggaagttgtgagaactacacaagttcaggtggattttcaaggaagaacttaatatgaatttctgtctgactgaatgagggacatgggggaaaaaaaatcaaacataactccaacagtttttgaagttgccatcacctataatggggaagttcagccttagacatactgaatttggaatgtcgattggataccagtggagatgcagtgggcagttgaatatggggtcagcaggtcaccagactgctctggactgaaaacttaatccctgggaatcactggcacatgatttgtacttaaagccatgaggtaaaatgagatccccaggagcatgagtgtagacacagaagagaagaggaggcaggggactgcgccctgaagtctccaaagttaggcgatgcagaagagaggagggaccagcaaccactccgagtgctgtaatctcacgtcctagaaagagagtgtcaaggaagaatgaaccatccactgtgtaaacgccactgataagcaagtacaatgaggactgagaactaagcgttggatttagcaatgcgcagggtactgactacctttggcagagtgacaatgtagaagactgaatgaggagcactaaaaaatgggaagacagaggagagagcaaatacagacaactcttagaaggagctgggtttgattttttcctagagatagggtcttgctctgccactcaggctgtagtgcagtgccatgatcagagctcagtgcagccttgacctcctaggctcaggtaatcctcctgcctcagcctcccgagtagctgagaatataggcatgctcccctagatgtgactaatttttaattttttttgtagtgacagggtctcgatgttgccccaggctggtctcaaacgcctaaactcaagcaatcctcccaccatagccttctgaagacttggttcaacagagaattgatccttgtacgggaagtggggtaaagaagttttagctggagctgtcattcagtagttgtgaaggaacagggtcaagcgcgcaggtggattaaatccaagagggcagctcctctatggtcccacagaggaaggcaggcagcagatgccccacgtggggcaaatgtggttgagggaacatgtgataattccctgaagattgtttcgctattttcagtaaactaggaaacagggtttcatgctgagagtgaggacatggaagaaaatgtttgcatttaaaagagaaggttgggctggctgtggtggctcatgcctgcaatcccagcactttgtgaggccaaggcgggcagatcaagaggtcaggagttcaagaccagcctggccaacatggtgaaaccctgttgtaaaaatacaaaaaaaattagccaggtgtggtggcacatgcctgtaaccccagctactcaggaggctgaggcaggagaattgcttgaacctgggaggtggaggctgcagtgagcccagatcatgccattgcactccaacctgggcaacagagtgagactctgtctcaaaaaaaaaaaaaaaaaaagagagagagagagagagagaaggttggtcagagcctctgggtttcccagagggaatgaaggatccagggaagtcataaattggtatacattgttggcaatatgaaaattgaaagcttgcattctctttgatctgaaattcacctttattcactcattcattacagctctaggtggccgagagccttctatagtaggatccatatctaactgttatcaatgtttaatctggaagaaaaaccaaaaggaacaggagacaattactttcatttttgccatatatatttctacactgcttgagcttttacaagataaacagcagttttataaatttccaaattgcatttttatgtaataatctgctgtaaaccttgttttcagcagtatagtttacaacttctcctcaaattcttttccagccacagtgaattgttatttgctgtaccctgaaattacaactgtatccaggaaactttacaccaattcaccagataattaatttcctgatgactgctactgctgtcatgttcccattcttcaggatccctgaaactacctgaaagatgaaagaagcatggtaacatgcttacatcaaagtttcattaacaggtttaacttaacacacttgccaacatttcaagaggcgtgtttcggaagctggcaagctcccaagtcccctccacacttcaaaactcctcttgagcctttctcatccctaccccacaaacaccgagtgcttactatctatgtgccaggcactatgaagggctggagatgccgtgacgatgaaaccgcctttgcaaaagtataactgaggaaagtatgacagtgaaagaaatcagacctaaccgactccatcttgtttctaacctttaagctgtccttgtttgttcttgggcataggctgaactaactttgggaagggattcagttcatggtttgactctgaagcaaaactgataatagccctttcccagaaagacccccttcttgcctggggaccagtccaccttgcagtactaacaaattagctacaagattagaaagtacagtgtaggggtcatgcagcctctggttccaagagtctgaacctctccacgtggctcctgggggtaacatcactattgaaaaatctaagatcagtgcttgagatattttgtagaccctgcactcgatggatcagctgacaccacccagacaggtaatctggctcaaccagttctgccatctcacccaggaacagaaaacagcaagaaaacctcacttcaaccccctattattccatctccagcctgaacaatcagcacttctcacttcccaagcccctacccaaatttctttaaattatctttaaaaactctgctccccagtgctcaggagattgatttgaataataataaaactccggtctcctgaacagccagctctgtgtgaattactctttctccattgcaattcccctgtcttgataaatcagttctgtctaggcagtgggcaagggaacccattgggcggttacaaagaagggaggaaaaaaaaaataaaagcaaacacaagttttttccccagtgtagggtagcagccagatatcgataatcatgaaaataaatgcaaagtgacaactctgaaaagccctatacaagaggaggttgttgcaccaggaaaagtataagagagagagatgtgaacaactcagggacagcgttctcgaggaagcgacaattatgctgggatctgaaggaagcacagacattaacttggaggtgctgaagtgaggaacagaaagagaaccgcacttacaaaggccctggggtagcatgcttagactctaggctcatgcttagactctagagccatgcgacataattacaaatcccagctctgcaactgggcatattggtaaacatctctgtgtatccattgtttattgtgtaaaacaggtatagtcatgctaaccttacagaattgttataagggttaaatgagttatttgtaaagcttacaatgatgccttgctttgctgaacaacttatgtaagcatcttttaaataaaaataattccaaattaaatgctaaaacttattaagtatgtccaagcattaaggaggcagatgacaaaatgtaagtttatcctgctggatgcattaaggggaaaagaaagctttcacaataggcaataaagacaggcaacaacagaccccatgtattgggtagagtgaactgagagatgagaacttaaaaatgtgatcacacctgccgcaccctcccccaattgacctttggccaggcacagtgactcacacccagtaaacccaacacccaacactgggaggctgaggcaggaggattgcttaaatccaggagtatgggaccagcctgagcaacatagcaagaccccgtttctaaaaaaaaaaaggaggattgcctgagcccaggatttgaggctgcagtgagtcaaggtggtgccactgcactccaggctgggcgacacagtgacaccttgtctcaaaaaattaaaatttaaaaacaactttcaatataaagataatgcaacatatatttgcaagagacaactataattttggtgatatcaatagtatgtatctattaacaatatactgacaatattggctgatgtaaactgtacaccagtgcacattctatatcaaaatccaaactgagactccagggaaccaatcatttgtcattaacactaaccacactgaaatagttgcagagtcattttagacaatgtttcaagtgatacagaaaaataatattaatccctttattgaggtaattagaaataatttgcactttcctccagactaccagtgttagacataataaacacacacactggagatgaccagctatggcatacagatgtgggcttattgaaacaattattactcagaacagacctgctgacaacaaatgtgcattcaaattattcgatctgtctggatctctgggtccctaactcttgaagtgacagcacaaaacagttcattagatatagggtcaatgttgttagtattaagcattgttatcctcatttttttttttggcagaacgaaaacttggaaaatcctggttacattcagagatggtggcaaaaagagtcagcaatataattcatctagaagtatttttaatactcaaagtcttgattttgagccttttaacattaattctcccagcaatttttctaaaatttctggatgtaattaagatattcagaaaaaaaatgtagagaactcatgcttgcaggttcctgtttatagtttcagtgctttaaagtttttaatacacttttatcttccatttcaaaggctatattaattatataggaaaaagctgacagaatttgcaactcaacaaggctatcctttagacaaggatataacatactcagaagtcagaaaaactgaattagtctgggcccagtggctcatgcctgtaatcccagaactttgggaggccaaggcaggtggattgcttgagcccaggatcttcagaccagcctgggcaacatggtgaaaccctatctctactaaaaacacaaatattagctgggtgtactggtgtgtctgtaatcccagctactcaggaggctgaggcacgagaatcgcttgaacccgggaggcagaggttgcagtgagccgagatcgcaccactgcactccagccagggtgacagagtgagactctgtctcaaaaaaaaaaaaaaagaaaagaaaagaaaagaaaagaaaaactgcatcagggaagaacttttaacaaaaaaagtcacaaaaaaaggctttaccatttgctaggaaccatttcacaaaacccacctttattatagaaattatcttctgaattactaagatgaggcaggggaagggaaaaggaagtagtaagaaaaaagaagccaggaaacatattttcttcctaaaaagatgagaataaagtcctcatgctttgtaaaagggaaaattaccagggttgtcatgtttgtcaaacaatagagaaccgtcttttcatcaggaaaactataaagcaagcatacaccagctggactacatcaaaagcaatcaaagcaaggcaaaaaataaaacctccaacttacccaaatgcttgtggttcagaacgcctaaagagaattaggcaaagtatgtgagctctgatttactaacacatattgggttgatgattcatagctcctcatggagactttacgcctaaatgaaaataacgatgtgtaatgcaactgaaagttactgaggagcctgatcaaagtgatgagtagataacagttgaaagtagcagtgatagctaacttcagatcagtagggaggaggccaaaagaggccggtggagaattggctatggttcaactgaggcagtgtgataaataaaatcggacgctggaaaggagtcgggggtagggcagcggtggtagagaggtggttgggggagaactagaatacagagcaaagggatttagtcgtagaggaattaatcttcagattaaaggatcaatatgacactaaaaccatttatgcacttggcaagctgtgatcctgcacacttgagcagcaaaatcgtgtgtggaagaaagaaatgcagctttatcagctccatgtttagtctcagcaacaacaggtgagacagacaggtaaaagattggctaactaatgttaaacggaggcagaaatatctcccttaaagtaaataactgactttcaaacatatgttagtcacaggccacgaagacactataagacctaataggaggctttctaatcaaaccatccaggccatattctaggcaatgatacctactgccatgcgatcacagtctccaaacacaaggaaccaaaaaaagaaaatcaagattcaggaaagcctaattcaaagtaaaaaattactaaataaaatagaagtttctgttgtccaaaacaaaatttaaaaacaccagaattttttttaaaaaataaaacaaacatgtaacttacaccaacagatacttattttaaatacccagcacgacctagggccgattagaatctcaattcctcatttcagaaatgtttgaaacaaaactagagaaactagagaatttcacactttccttccctccacctccacagcactttttcaagaaatacatctatgccacaatcaaggcacaagtatctagatctattgatctaactatatatcatagatattctgaaaatacaaggaaaatgatgacaaagtacggagcatagatccacctatacaaactataaagagaatttcgtttagaacaacttatttcctattgctttctcacagaatttgaacaaatataacttattgcttttaaacctaaaaacataaattcaatgctaaaatgtgacactaaatttcaaaacaatgacatatctaaaatgggaaaaaatttaaaaaatacagaagcacaagaaggaaagacatttttccaattccagaaaactgcttctgtaaaaatataatattctgtacaagacagtagtggttcctaagagaataaatggctcagaatttgatgaaagtgttcccgcagcgaacaattcactctgcttgcagattccagatgctcaacattcctgacatcagaacggaaaaatttactgttagtctagagaaatttaatatcaccattcttgtcatatccctcatagcttcattattagtacaagtctggggaagccataaacctatgttaaatgataaaaaaagatgttctctgggttcaatcatactcatataagcaaccaaaatatctagaagtcatatggaaaaagacttgagggaaaaacaaatatgtatttacgtgttttttgtcttagttctcacatttgcattctgtgcagtatggtcaggcatcggaccaaaacgttttactataacctagggctaataaacactaaagaacatatatcgacgcccagaacaacactataaaattttattatattaataaaataggatacaccaagctttaaattttccactttgtcaaaggtaaaataatcagcactgttcggtgccattcataacaggctgcaatttttcccatttaaagtatgttttatttccaaaactacctatagtacactaaaatactaacacaaccctgagagaggcaatctctttctcacactttccctcaactgcaaataacttattaaagcattgggccagctgagtttgtaaatatgtaaaacaatctaaataattatagtattgcagcttgcttgataacactttatacaattatcttaaagtccataaattcagggtgagttaacaggggaacatgcatacaactttacctaactttcatttgtacatgccatctctaagctttaaataggttccaatttgtaattaactgtcaatagtctgtagctctgcacaaagtattctctactaccaaaataaatacgatggtagtttgatttttagcagtattcacccaaaaaataaagccatagaaaaatgaaaattacttctaaagctcataaattatggcctataaccatcctttccaaaaatcgattacatttacgttacattaaaacaattacaggctttcctacttgaagtaattggctataaaagctaaaatgcagtattggctttatgatattcatagtaagataggacttatctcaagcataacatgtagtttgaccaaactggacagtaaatctggattttacattacattgcaaggtagcaattcaaatcttacctctcatcacattactgtagccagcattcattgtattaagtggtaagcaatcaacagatcagtaggtgctaaccttgatcaggaagtattggtcatggcaagagaaaccatggaagcagaaagtggcctatttggttgtagagatgatgtagtagaaagagaggtaggcttttctcctagagctgttatcatagtcaacagagataaagaatgagtatgtagcatctaattaatgcttcccagttttgcaacgggacaaaagcataaaaaacatcaagcacaaggttggcccttaataagcagtagcttctattgtcatctttatcatatcctcttagaggcttgttagtggaattaaaaagcatttaagtgaaaggaaggctcttagcagagttcaagggataaaagtatcttaaatggctttctttgcaaacattctccaagaacaacctgttacacaataatgcagcggctgaactcctaagaaacctcaagctaacaaaaagacgaaccctcatttcaatagggaaagacatggtaggttagaaagtttgcaactaataataactaaggtccttccaccgtgaattttagaaaaataaagtaatctaagctgtaaacgttttttctttttagctaaaaataacaaactggtggttcactactgataactaccaagttaaatgcttcccagcctttcaatccacactcaagtattctctaaacaggtgacattttttttagcaacagaattcataactattgggattaaatccttcccacccaaaagaacaaaggagcagccagcaaaacttcctgacacataatgaaatatccagaagcagactggtgatgcataaagaactgaatacaagataagagtggcacttcaaatcagttatgtggtgaggaattattctaccaagagcagtaactgctggttcaccatttcagaaacaagtgaaatcaaataaactagatccccacgtaatgaggcgaatcccaataatctcattacatccaaatcatgttatgaaaattcagtctaagagacacttgctagagtaaaaatcccttcaagatacgtacggaggtgatttttctacaacccctaaatttgtcaagaagaaacaaagcaaaatatatataccttaggtagtctgtgccttatcttaaaacatgttcactggagctccctgggcaatatttttaaaatctaggtgattcgagtgctgcactatatcggaaagagaagtttaacatttaatgtgagtgctagcaaataaaatattttaaagtttttatcagtattttcaatagtgctatgctagctatttaatttcatcttaacagaatgaaatcatcttctagatatgatctccatttttattggaactgcttactatccatccctaaagttctcttctaagaggaaaaggtcatgttgtttgaaggacaaaaaagttcatattcacaaacagaaaagactattttaatattgaacaattctacatcaacaggaatctgaaatctaccaagacaattcttaatatatttggtcactcaagccatcacaaactctttttaggactgaaccctaagatttgtactacgattaaaaaaaaaaaaaagtggccaggcacagtggctcaggcttgtaaatctcagcattttgggaggctgatgcaggagggccacttgagctcaggagtttgagaccagcctgggtaatatggtgagaccccatctctacgaaaataagaaatcagccaggtgtagtggtatgtgcctatagtcccagctgaggcaggaggatcacctgggcctgggagttgaggctgcagtgagccctgattgcgccaatgcactccagccagggtgacagagtgagactctgtctcaaaaaattaaaaattaaaaaacaataaaaaaatttaaaaagcaaaacttttttgtggcaatgaatattacaatttttaaaacctagtgatggccgggcagtggttcacgcctgtaatcccagcacttcaagaggccgaggcaggcggtcacgaggtcaggagatagagaccaccctggctaacatggtgaaaccccgtctccactaaaaatacaaaaaattagccaggcgtggtggcgggcgcctatagtcccagctacttgggaggctgaggcaggagaatggcatgaacccaggaggcagagcttgcagtgagccaagatcgcgccactgcactccagcctgggtgacagagcaagactccatctcaaaaaaaaaaaaaacctagtgatttggctaattttaggtagtattacatacacataagcatactggggatctaggctataaaaatagcttggccaagatggtgaaaccctgtctctactaaaaaatacaaaaatgagccaggcgtggtggcaggtgcctgtagtcccagctactcaggaggctgaggcaggagaatcgcttgaacccgggaggcagaggttgcagtgagccgggatcgcaccactgcactccagcatgggtgacagagcgagcctctgtctcaaaaaaaaaaagcctcccaatataactattcaaatgtattaatattttataagaccactgaaatatgctctcttaaatttaagagtcacttgttatagcattttctcctgagcaagaaactgctaggaagcgaggatgggcattttccacactaatcactgagctcgaatcttctgaggaaacagtgcaagagaccagattaattcttgtttcttaaggtgtggcctgccaaacaatgcggggtcccaataatctttcaagtggtccacaagctgcttcagtcagtaagattttgttcacctatgctcaaatttgcagcatgattataatttttgcagaaatctcattccatcatcgttgcataaggctatacaagtactgtagagattatgtttgtcagagttcttctaactaacttccactgtcatttgcttattgccatttgtgtttggagaattactgttttacaaaattacaattatattgagccatacattctactgagtaaaacagatcaaagacaggattagtttacagtagtaatcaaaaatagtaatgcaaacatagaggctcccaatcttctgagtatttctgatctgagtctcaagtgttataaggctacaaaggaaagtaaatataaggctattcacctataaactgaaatgtataatattaggcttcattccaacatctcttcccacctaacacatgctcactctattaatgtcattggtctttatcttggatgccataaacgtcattgcaaaaatacacaattttggccaggtgcggtggctcacacctgcaatcccagcactttgggaggccgaggcagaaggatcacttgaggtcaggagttcgagaccagcctagccaacatggtgaaaccccatctctactaaaaatacaaaaattagcgtacacgcctataatcccagctactcaggaggctgaggcacaagaatcacttgaacccaggaggcagaggttgcagtgagccgagatcatgccactgcactccagcctgggcaatagagtgaaactccatctcaaaaagaaaaaataaataaatacacaatttcacagaggtgagaaaattcaactgtaagcaatgctggagatgaattagtttctgaaaatcttacccagttaacaactagaagaaaaaactaacgtgcttaacaacatattacacttgaaaagagaacaatgtgaatatcaaagttaaaaaaaaaaaaacctagagaaactgaagactgcaaatttttttgttaaaatgctcttttcattgactttctggaagtaaaacaaagtgctgtcacaaaatgttgtgagcaatattaagccaacaaagaaaaattcagcagaatccattctacattctatgaattagtacaaagctaaaattataacctaatatgtccttcattaaattaaaaacatgataatttgcttcccttttctggataaagttctgatcatttttgctactatttaacatgctctttccatcccccatttaacgtagattaattttatatggcccttttcttccatccattactattagataacaaaagcatcaatggagaaagttaacaggattccaaccttaaaacacagcatgaatctatctgtgttaggagaagttaaactaaaaatgcatttaggtaaccaaaaaataaacgaccaaaacatgaccataagaattagattttgtttatcaaaaaaataaaaataaaaattttttaattctaaatttaaaaattgtgagagccactctcccctatccccagtgctctgtcagttgagaaattctgtcaaacagtggtataaagccatcaaagttctctagtaacttttaaataaagaatagtgatttattctgcaaataaacacaaactagtgcttcccaggataaaaactggtagtcactaaatgcagagatgaaaaactacatacagtgctgggacaatggaatttccacatacagaagaatgaagttcaacccttacctcacaccacatacaaaaattagcttaaaatggatcaacaacctaaatatttgaactaagaccataaaactcttataagaaaacataggagtaaattttcatgaccttgtatttgatcatggattcttagatatgtcaccaaaagcatcaacaacataagaaaaaattgataaactgaacatcaaaattaaaaacatttgtccatcaaaggacattatcaaaaaaagtgaaaagacaacctacaaaacaggagaaaatatttgcagatcataaatgtggtaagtgtttaatatccaaaacatatagagaacagggaaactcaacaacaaagacaatccaattaaaaaatggacaaaaaacttcagtaaacatttctctaaagaagacaaatggctaaaaagtacatgtaaaactgcacagtgtcattagtcattagggaaatgcaaatcaaaatcacaatgaaatcactccacactttcctacaatggctataatcaaaaactatgggaaataacaaatgctgataaggatgggaagaaattggaaccctcacatattgctggtagaaatgtaaaatgttgcggcatccatggaaaataggttggtggttccttaaaaagctaaacacagaattatcatatgaccaggaaactacactcacagggacatacttatttttgtgacaatgaatattatattttttaaacccagtgacttggctaattttaggcaatattatattacacataagcatctaaatcaaggactcaaagagatacctgtacagcaatgttcactgcagcattacgcacaatagctaaaatatggaaacatctcacatgtccaccaactgataaatggatacacaaaatgcagtatatacatacaatggaatattattccaccataaaaagaaattaatttctgatacatgctacaccacagatgaaccttaaaaacattatgctaagtaaaataagtcagtgaagaaaaaaggcaaatactctatgattccacttacatgaaatatctaaaatagacaaattctagagacagaaagtagaatggtgattgacatgggctggagggagagggacaggtaaagttaatttttttttttttgagccccactctgtcacccaggctggagtgcagtggtataatctcggctcactgcaacctccacctcccgggttcaagctattctcatgcctcagcctcctgagtagctggaattagaggggcacaccaccatgcctagctaatttttgtatttttggtagagacagggtttcaccatgttgcccaggctggtctcgaacttctgacctcaggtgatccacccaccttggcctcccaaagtgctggattacaggagtgacccaccacacccggccaggtcaagttactcttaatgagtactgagtttctgtatggggtgaaaagaatgtttaggaagcagatagtggtgatgatcataaaacattttgaatacaattaattacactaaattttatacttaaaaatggtaaaaatggcaaattttatatcacacatattttatctcaataagaaaatcttaaaaatgaaaaataaactacaaagacatcattaacggttacactccttacagcaaaagcagaactcgcactattcccataaagattctaaaatgagcaatgaaatgaaacacaaatattatgcactgataaagattactggtaaaattcctatatgaaaggacttttttaacagtaaaggcatgcaatgtagtaaactaatcactattatgtatgcttgctagcaggtattttaccttaccattaaaggaagctactgatatgacaaacattgaggcatactctctgcacgcaggagaaacattgtaagaaaagaatactcagtgattttctttagtttatcactgaaaaccccataatacctgaagaggactttttcacttagttctaaatattttgtgagtagtgacaaggacaagagtaagtgtactgattcagtgttaaagaatacaagctctgtgtacaaggaagtacattactcccaaaaagaaggttttcccaaatgccagttcacacactgcttcttgttcacagagaacagcttgaggtcaactacatggataacgatctttttttaaatttaatttttattttcagttccaggatacatgtgcaggacgtacaggtttgttacataggtaaacgtgtgccatggtggtttgctgcacctatcaacccatcacctaggtattaagccccacatgcattagctacttttccgggtgctctcccttcccccacccccaacccccgacaggctccagtgtgtgatgttcccctccttgtatccatgtgatctcattgttcagctcccacttacaagagaaaacatgcagtgtttggctttctgttcctgcataagtttgctgacaataatggtttccagctccaaccatgtccctgcaaaggacatggttgatcttgttcctttttatggttgcacagtattccatggtgtatatggaccacattttctttatccagtctatcattgatggacatttgagttgattccatgtctttgctactgtgaataatgctgtaataaacacatgcatgcatgtatctttataacagaatgacttatattcctttgggtatatacccagtaatgagattagtggatcaaatggtatttctggttccagatctttgagaaatcgccacactgtcttccacaatggttgaactaatttacactctcaccaacaggataaaagcattcttatttctctatagcctcaccagcatctgttgtttcttgactttttaataattgccatcctgactgaactacttgcccaacaatcttaatttgctctgcaaagaaaccgaaaagtatgaatatgatcaaatcaaatcagcaaagtatactttgggtgggggaactgttggaggaaaaaagcaacaagttcaagaccttgcttttccacaaggaaatatatgaattaccaagaagaaaaaaatgttaacatgagatttttttttatacgaaagatgagaacaaagtaatttcatgacactgacgatatcagtaaaatccacttttgttttttaaactggattccttgagtggtaaatctcagtgatatattcattaccttcagtaatttgaatctatcactttaaggataaaggatcatgattttggtaccagaagtgaggttaacgagacttccctaagcaaactgatctatagtgcaaacaacttgaacatgggccaaacatttttaaaagaactaagcagcacttcttggccaggcacagtggctcacacctgtaatcccagcactttgggaggccaaggtgggcaaatcacctgaggtcaggagtttgagactggcctggccaacatggtgaaaccctgtctctactaaaaatacaaaaattagccgggtgtggtggcacatctgtaatcccagctactcgggaggctgaggcagaatcgcttgaacccaagaagcagaggttgcagtgagctgagatcacaccactgcactccagcctgggtgacagagtgagactccatctcaaaaaaaacagaaaaaaagaaaagaaaaaaaactaagcagttgcttcttataaaaatcatcatcatcattgaaattaaaaactcagccccagcatgtaaaggagagcaataaagctcaaaaaagaattaaccaaacaagataggtgagaattactcaaagggctgatggctgatggaaagaccaaaaaagactgaactatataagagggttaagaaagataagggatagaagaaatgtcttaggcatatttaactggaacactagaatgataggagagaggaagaatgaagtacaggtaacatcttaaaagattaacagctgaaatttttccagaattcatgaaatacatggatttatatgcattcaaaaagccaaatgaattctggataaggcatagaaaatgaaattccacctagacacagaatagtgaaagtgcagacatctaagaaaaaaagaaaataataaaaacagccagagaaagaagccagattacttccaaagagagactctgacaactgacttttaaatagccactttgaatatataatttcattgcctcttgctttcagcgcactgaggaaaaaataataactgctaacctagcgttatgtgcttggtaaaaactacttccaagaatgagcacaaataaaaacattttcagcaataacagagacagtttgatagcagtagaccttcaaaacaggaaattctaaagatttttactgtaagcagatggaaaaaccatggtggatgaaaatgctgagttgtgagttggaggtaaacaaagaaaatggtaatatgtgaggaactctaaatgaatactgatagtataaaactgtgacaatgggccaggcacggtggctcatgcctgtaatcccagcactttgggaggccgaggcaggcggatcatgaggtcaggagatcgagaccatcctggctaacacagtgaaaccccgtctctactaaaaatacaaaaaattagccaggcgtggtggcaggcgcctgtagtcccagctactcaggaggctgaggcaggagaatggcgtgaacccgggaggcggagcttgcagtgagctgagatcacgccactgcactccagcctaggtgacagagctagactccgtctcaaaaaaaaaaaacaaaaacaaaaagaactgtgacaatgatatcttcaaggtctggggttttttattttaaaaagagaatgaaaatacatgacacagtagcatgtaagttgggaacatatgaagtagaagtcctgtaaggtccttagcttgtccatggtgacaatgaaggtagagattaatgttgaatttttaaaataaaggattcaagtagtaattttgaaggaaactaccaaaacaacagaaagagaatgtataacatcaagacataggggaaaaatgaaaatgatagaaatattctaatcagtccaaagaaaatataagtaatagaaagaaagaataggacaaagagaaagcataaaatgggatggtagattttaaattttaaaagtcagtcattacgttaactgtattgaaaatactctagttaaaagcaaagatttgtacaaccccaaaaagcttcaattacaagcaattcacaagagctccatcaatacattaggaacacagaagagctgaaagtaaaaggacagaaaaagataaactactcagtgctaacagaaaaaaaaagtatatacttcaatataaaatttatttaaaaggcttaatataccaacaaaataacatatttaaatatacaaaagaaggccaggcgcagtggctcacgcctgtaatcccagcactttgggaagccgaggcaggcagatcacttgaggtcagaagttcaagaccagcctggccaacatgatgaaaccccatctctacaaaaaaaatacaaaaaattagctggcatgatggtgcatgcctgtagtcccatctactccagaggctgaggcaggagaattgcttgaacccgggaggcggaggttgcagtgagccaagatcatgccactgcattccagcctgggagacagagcgagaatccatctcaaataaataaataaataaactaaacaaaaactgatagaactacaagataaatccataatcgctgagggagatttttaaaaatacttctcttggtaactgaaggaataagcagcagcaacaaaaaatcaattagaatacagaatatttgaatgacttaatcaataagtttggcctaatagacacatatagaaaactacagtcaataattacagaatatacctatggttaaacatattcagaatacttattgaaattaaccatatgtctaagccataaaataaacaaatttcaaagggctaaaatggtgcaaattcagctttctgaccacaaagcaattaaggtaaaaaatcagtaacaaaaaaaaaaaaatgaaaaaaactcttatgtgaatatttttttaattctaaataatcaattacaaaaattctaaagcaaacacttaataaaattagaaaatatttttaaattatagcacaaatagagccaacaaaacttagcgagaaatagtcctaaatgtgaacattaggaaaagggaaagattaaatatttataaacaaagtatttctagaaattagaaaaagaacagtaaaaattaatgaaataaaaacaaatgtacaatagagaaaataaagccataagttttatatctaaaaagactaatagaattgacaaaactctcacaaaattaagaggagagaggaagagagtgcgaaaattaccaacatcaggaccaaaaaaaaaaaagcatcaatgtagaaactacaggtacgaagtaataataatacaaataattctttcccaacaaatttgaaaactctgataaaatggacagtcttggaaaactgtaaatcaccaaaattgactcaagaagaaacagaaagctagaatattcttttaacctttaaaataaatgaattagttaccaaaaatcttatcaaaaagaaaattcccaggcacaggtgacctaacaggtaagttctactcaagtaaaagttaatatcaatctttcacagactcttccacagaagaggaaaggctcctcccaatacactacacgagaccagcatgactttttgaaattcggtaaagaatgaaaaagtgaaattacaactgaactcactcatcaacatagatctcaaaattctaaacaaaatacgagcaaaccaaatccagaaatatataaaaaggatagtaaattatgaccaaattgggtttatccctagaatgcaagttggtttaacattcaaaaatcagtgtaaggccaggcacaatagctcacacctgtaaccccagcactttgggaggccagtggtgggacgatcacttgagcccagaagtttgagaccagcctgggcaacacaggaagactcacagaagtctctacaaaaaataaaaaattagccaggcatggtggcatgcgcctaaagtcctagctacttgagacactgaggcaggaggatcctaggagtttgaggctgcaatgagctacaactgcaccactgtactccatcctgggtgacagagtgagatcctgtctcttaaaacacacacacacacacacacacacacacacacaaattgattggtaacgtaagatggattggattgcttttctcttcttttaaagaaaatagtacacatgaagaggcaagcaaagagtagacagccaaaaatatagaagaaaaagctttatggaggtgtgctagggagttaatttttttaaaataatacttttcccctggattctataatacgtgttatatgtagccactttcgaaaatttacaatatgttttcattctaaataaatattcactttcaaactaaaaactgcttatggtgtaattccatttataaagttcaaccagcaaaattaaaccacattgcctatgaatgcttatacaaatcataaactatgtcttatgtgtagtctgacgtaggagtcattaagggggttgggaagattgtgactgagaagagatacacaggctgccttcaaggtgttggaatttttgacctaggtggatgatggtcacatggatatgaccaggtcacatggatgctggcttataaccacttttaaaactctacttataaaggttttttatgtgcatttctgtacctatattatatttcacattatatgatgcttgtaaaaatcataatgaaattataaaactaaaactaatataggtattatgcaggaaaggaatgattccataagattaaaaactataaagatagtatggcactatcccgggaataaaaataaaatcaactctctagctaataaaagttgtttcccatgggttaacaattctgatactgctatattggtacacgtacactgggactgaacaattaagtaaatcgatggtggatggtagtagcaggttttccactgttggagggggaagaggctacaatgatccgtttgctaaggattagagttgaaaacatcaatgagaactcatatttagtttagtatagttacagatgattacacattgaaatgttcatatacgtttatgtgtgtttacgcatgggttaacttacacacatacacttctttgctttgtcagctgaaagaggcttaaagaaacaacactccggccgggcgcggtggctcacgcctgtaatcccagcactttgggaggccgaggcaggcggaatcacaaggccaggagaccgagaccatcctggctaacacaatgaaaccccgtctctattaaaaaaaaacaaaaatacaaaaaattagccgggcgtggtggcgggcgcctgtagtcccagctactcaggaggctgaggcagtagaatggtgtgaacctgggaggcggaacttgcaatgagcctagacagcgccactgcattccagcctgggcgacagagcgagactccgtctcaaaaaaaaaaaaaaaaaagagagaaacaacactccaaggctgagtgcggtgcctcatgcctataatcccagcactttgggaggctgaggcaggagcatcacttgagctcaggagtttgagaccagcctgggcaacacagggtaccccatctctaccaagaagaaaagaattgaaaagaaaaagaaaggaaaggagaggcagagggaaagaagagagaagacagaagagggaagagagaagagagaggaaggaggagagaaaagagaaaagaaacgaaatgaaacaaaacaaaacgaaaaagaaacaacactccagcagcgataagcaaacctattgcccagatcttgatttctaagcccatcccaacaaaaggaactagagccccttagagaaatgtctacttctaggactggggcaggaaatacacaagatgagccaagaatatttgtagtatcaaaagtaaggaagtgctaaaaaccaatgagcccacattgatgggggttatcaaggaagccaactcaaagagctcccaagggccaaagctggaacaatttgagcaacaaaataaagtagtcatggcttataacccaaagtacaaaataagtatccatgactccatactgatctgaatgactgaataaattaataaatgggagagaaaagacaaagaattccaaataatttagatagctcctttaccctaaaggaggagaaacgacacatgctactgtaagtgtgggctgcacaaagagactttttccaaagattacagtatggaaaggatgaaaaaaagagtaatcttacagtggggaaacctgacacacagtactttaggcaggtcaccaacattaatgtcaacagttataaatcgagttgacagaatataccctcagtgtgatatgatgacaatggcccttcaccgctctgatcttaccccacaaacacataaccccaatcttttcacaagaaaaatatcagacaaattccaggagaggggaatccttacaatatacctaaccagaactcctcaaaactctcaagattgtcaaaatcaaggaaagtcttttggattttgttgttttttgttttgttttgttgttttgttttttttgagacagggtctcactccatcgcccaggctgaagtgcagtggtgtgatcactgctcactgcagcctacacctcccaggctcaggtgatcctcccacctcagccttccaggtagctggaactataggcacatgccactatggccctaattttttgtatttttagtagagatgtggtttcaccacgttgcccagactggtctcaaacttctggactcaagagatccacccacctcagcctcccgaagtgctgggattaaggtgtcagccactgtgcctgatttctaaagtcttagaaatcattatggccaagagaagcttaatgagagacgacaactaaatgtaatatggtattacgaatgagatcctggaacaaaaaaaaaatgacattaacggaaaatgaaggaaatctgaataaagtacagattttagttaataataatcatgtatcaatatcatttctccaaatgaaatgaatttaccatactaatgtaagatgctaataacaggggaaactaaggcaaggcatattgaaactctctgtactgtcttcgtaatttttctataattctaaaattgctctaaaaataatctataaaaaattaaatataatcaacagatcatacagccaagaaagagaactcagaaaatatatgtaatgctggattatgatagaggggatattaaaaatatacatggaaaggacagactattgaataagtgatctagggacttggtggactacatgaaaaaataaaatcaggtgagattagactactgccatgctccacatacagattacagttggattacaatttcaaatgtgtaaaaacaaatctttaagataactattaaaaatcttagagaatatcttcataatcttgggatatgaaaggccttcttaagcagaagaaaggtagcatgcaccatacagaaaagattgatttgactacaaaaaagttttcaactattatagaagaaatgttattatttaaggaataagaaggacaaatgactgaccagaagaaatgatgttcaacctataatggctcaaaggatgaatacacaaaatgtaaataaattctgcaagtaaattagaaaatgacgaaccagtacaaaaatggggaagagatatgaagagatgaatcacagaggaatgaccattaaacaaatggaaatacgctagctatcactagtaacgcacatttcacacttaagattttatgtttttcccaacagatcggtaaaaattacaaggattgacaatatttaatattgccaagaatgtaggggaaagcatctttaatacactgactgtagatcattcggtggtttaaccactctggaggacaatttgacatcattaaatgtgtacatcttcccttccaaaatatttacaaaaggagcaaaaccaggcttttgttaacagcaatatggttcactaaacagcaatatgatggaaaagtatacattagtttaaaagaatgagataaatacacagatgtatagagagatatagataaacgtgcgtaaacacaccaacacttttctatatttaacacggaaatatctctccaagaatatagcttggtgtagaaaaaaagctgaagaataataaatagggcataacaaaatctgtgattaaaaacaaaaggaaaagagactcaaaaacaatgtattaatgacatatatatgcaagtattgaatgcacaggaaactcttacaggctacttatcaaacggagaaaaaaaatgagatcgggggaaagcggcatgtttttatgtattacttgtataattagttttttttttcttcgtgaaataagcaagaagggaaagaagaagtggtaaaagttttacacagaacgtattttcccaaatgagcaatccatgcatctaggctgctgtgagtcgggtgccttgctcctgtggcacaagggtctgacttcaactctgttcccctggaactaatgggacgacgtcagcgacactgctaagcaacgctgcttatgggaaaaatgacccgactggccagttgcaaacatctgatgcatacgccgtactttgcggcttctgtaaatgcagagactcttgtcttctgtgctttgctcaaaccttgtggggacataaggtcagaaaacatcataaagcaaggtgtcactcagatcagcactttagatttgcactgcagcgagctggctgtgtgtggaaaagctccttttaaattcttaatagcctatgctatttttcatgactgacacctaaactgccttataaactataaatactccattttaatcctccttcaagttatatgtaagcaacgatattttgcattaaattaaactaaggcattttgggtgaacagcaaggtttaaaacatattcattacacgactgtagtaaatttatggttcacataaattttatccataatttcccaaagcactatggaaagttaaatcattcatttttataaagtagaacacaatgtgggactatataaaacctaaaaagaagaaaaaaaatttccaaagggtctggcttccaagttaaggtcttgagaaagaaaagctttacataatctaacaatcaaaacttcttcctgacaaaaacgaatcctcaatgtaaatcacagcggaaaaaaaaaatcattcttgatggataaagatgagacaaaacttgccaaaatataactatggatatgcttgaaatagcaaagaattatatttgcaaatagtgcaaatgaaaatgccagtgtaacataatacaagataaaactgaatttctgtttcggtgtttttgagattatagcaccagtcattgtaattgtccaatctgagacagccacctcagctggtttgagagctatatcaaccaaattcaggatggcccatataaaacagagaacattccttttcgtcacactatgttaccacttctttcaaggggctttaaaaatgcatgacataaggcccccaaccccatttacattttgttttagtagttcttagaggcatccaggattttacactttgaaaaagtgctgattctggtccagaacaggacctcaaagaggcatctaccaccacacttctacttcctgaatcagatcagaaggggaggattttatgtacacatgtgtgtgtgttagtttttttttcctttcttataaatacctattctaggtatctcaaagtcttataactgataataacataaaatatgtttgtttgttagttttaattgaatcccttaatggtatgtatcaatttcaggatagttttacctctggtgacagacagaaaacagagaattggggtaaggataatgttttatttcttaaagaaaaaaaaaagagaaaaatatgaatcaagtgtggcaaacagttcctagctgttatacatgaatgaaggataatatgggtatcacagtatttgccatacttttctataagtttcaaatacttaattttttaaattaaatgcacagaattattctaaaagcaagacagtatgagaatatctgcacatgccatcactacccagagaaagaggcaatgagtccatgtcctccagtaacttttacctaggagggcatccctgagttgatcttatgtccctagtgttggtgacagaaaaacaagcatgatctgcctgcatttgcttaaagcatgctgtatttcactgtgaacaagatttaagcaaagatggaatgagaactgcccctcttggggtcacataccagtgtcactcccagatcccgttgacaaagctggcatgatgcaaggtgtaggaacaggtcagcccaccgctctccggacaccctgccttcggacagccacagggaattccaattcaacagcctgcagccacgttgtctaccaagatctgtatattttgtaagccgtttctagaaaggaaagaaacatttatattttttaaaaagggaccatcaccaaatcacaacattctgtaactaattcaaaattctcatcccaatcactattggagagatcgcaactcttcagaattttttctacagaccacatgcaagtacaaactgtgagagtttctgatcttgacaagcaacttcgaattgaaaacatgaatgttctgcatgcgtgtgttgaggattccttaaagatttttacatttgggttgaggaacactgattggatacgtggataattttaagaagcttctgtaagtcaatgtcattctcaacttccttccctgtgttactataattctcagctacatttctaaatgtagaacagagactatataaattgtcagcaacttataatttttatttttttatttttatttttttttttgatacggagtctcactctgtcacccaggctggagtgcaatggtgcgatctgggctcactgcaacctccgcctcctatgttcaagcaattcttcctgccccaggctcctgaggagctgggactacaggggcccgccaccaagcctggctaatttttttttttttaatagagacgggggtttcaccatgttggccaggctggtcttgaactcctgacctcaggtcatatgcccgccttggcctctcaaagtgctgggattacaggtgtgagtaaccggacccagcctaattgtatttttttaaatagctcatcctaatatgacaaatgcatggttctctaactgatgtctgcaactaaccttgaaggaatatttactagaatggaagcaagatgttattatagatttacagaagtgttagtaatccaaagtaaatctaacaatccaagctagcatacataagtaaattcttttagtaaaaactaacctttgctttatctggaaaaatattaacttttttttcaataactatcttaactaatgtttatcctcaaataagcagtaaaggcagtatagcatagtagctaagaacaagggatctagagtttgacctaatctttaatgctgctagttctgtgatcttcaacaaggtatttcatcttcttaagccttaacttccttatatgcaaatagagacaatagtaaattagaactatttggtaattaaatatactcagacatataatgcagtgtctgacacatggtaaataaacaagaaacaatggttgttagggtttttttttaattcaggtaatgagattatacaatgaaaacacaaaagaaagtagcaagattaaaatttacattggcctaacacctagagggaggccatctggtttaaatttggatcacccctggctaataacagagaaagtactccatttacatttttgtagaaatcagaagaaccatacactgtgttttaagttcatttttaatgcactttcctcaattctctataaagcaaattcagtaatttagaagcatatttttaacatatattaacaacaacaaaaaaacattggaaacactggaaagactggttcacatcaattctgaaagcctttaagttgctgattcaaattgcagaataaagagaaatgaacttgccaaattttactttaaaaaatccaaactgtaagattctattaaagccttctaaatttgctttttaattgttaaagtgaaaattcgtattaaaaacttcaccatcaaatggattattttagaccagactatctgctgtaataccttgaattttcctttatgttattgcaaaggctgacatagttaaaacatgcatacaaatccatatagaaaagagtgctaatttaaaatataagaattgttatttgaaatgccaaatgaaaatatagctgactaagctaaaaattaaaaatgtgaggcaagatttcactaatgcacacgtatggagctgttttttctaacaattttgaaagcaactttgctttgccttcataaattattctaaaaaatcagtgtgatgaattcaactacaggaaaatgttccttatataaagcaaggctagaaatgaagtaattcaaagtcaaaaaaagactgtataatttaaagaacacagtcaattagtagacttttgttttgctaatattaaaaaatgaaaatcaattaaaatttctaaaatgtctgcagacacatttgtaccattaggccaatatatatgcatgtatgtttgtgagtaggtatttattatatgtgtgtgtatatatatgtaatttaagtttctttatgtcatgagaaaagcctaaatttatatggtatagattgcacatatgctataccatgtacaccatgcaacctatcactttcttcacagcttaaagaacttacaatgtttcatgcttgtaaaccatacacaccatataataagacaacatatgcttatatcaattagaatttcatacaatttgaaacattcacattccattaatactaaagaccttacattccaaatcaaaatatccttttgagctgatattgctgctgttcatctatgccatatacaaaaagccctcatatttcttgttttttatttcataatgaacactcaaggttaaatttttccaaagctgtatcatttactacaaaacaattatcttttaagtatatatactacaaagtaatcaccttctcagaccatatacaagcatatgaatttaaaaaatggtttgacagaatcctaaccagtaatactttgtattttgtggaatgaagcaaagttgctaggtttaactttcaaactgagttaaacttttgtagtaatgatgttattttctttggcaaaattcattgaaaatgctttggaatttgtcggaacgcagccataattattactgactgttgtatggaatcgatttactacaacacaaaaataccagctgtaaagtatgtcctaagagggattaccgaatattcttaaattgaagttcaatccatctttccataaaaaagagaaagacccgaaagccaggaacataacagcagtatcaagtgcacctgaagcatttacaatacccaatagaacgattacaaccctcctttaaaagggcttatttttgaaatttcattattccagttgtaccttgcttctatatatcacactgtatcaggttcctctggcactgatcatgtggaaacagtgaactatgtgaaggtctatgagcttacaacgttcaatttctacccactctgggtaactcttaatgctcccgtggcactcatgacatctagtggtcaaccacagaagtgcaagtgtttaaaacttgttttcagtaaataattaattccatagtctgcaacattttttattaatgtgaacatatacacacacacacagttaatatatatcaacaagaaaccaagtacttttcaaatacatttcctctaaatttgggtaagtgttcaagaatatgaaaacttgtaattaactgtcatcataaactactttaataattatgttagcaatctatcatttcagaagaataagtgtgctcagaaatccaactgtagattatttcaccagatacacatactcaaaagttacattttcaaaacctaatagagcaataaaataacacaaacaagagtaaactttttaaaaaaaaatctatcacagatttttgtaaaagctcaatctgaaagactcattagttctattagccagtgcaagaagcagacttatatctgttaacatatttggaccctcataaattataattgtaagaataaaaggaggcaacatatactaagtggcagacatctgcttatataaaatggtacttgtaccttttataccagccattctcaaagcatggtccacagacccctagtggtctccaggacccttccagaggggtccatgaagtcaaactattttcataaaattactaaagaaagtactgagatgttatttgtcttttgcactgtaccagcatttgcaccaatggtgaaaagcaatggtcacagttggtaaaaccactggcacctgagcatgagtcaggataatggcaccaaattgaaactattcaacattgtgttcttcactgccaaggatgctcattcagagtaggaggaggaaaaggaagaaaagcaggaagaggaggaggggagagggaaggttcattatagaatatccttaatgaagcagtaaaaattaatattaattgactcttgagtacccttctttttaacatcctgtgtgaataaggggaagcacacataaagtaactgctgctataaacaaaggaaatactgtctcaaaagaacacttgtgcaatgatttgagttgtgagttatactggctgctttgatcatggaacttttttttttttaacttaaaagaacaactgaagacaaactatggttattcaagcttcggtatttggcaaacattttcttgaagataaatagagtccatactttcaagggaaaccaaaaacagtatatgttgctaatgataaaaatgagcttccaagcaaaaatcagaattttaaaaacttgcatccactagaggctcattttgctatgttaactgaaatacacgcatggtggaaccaagtccccactttgcactggttctatcagcttctcaatgcccaaagcctttgctgagaagacccacggtggtattaacaaatgtgattttttttttttttggcattttgtatcaacattgggaagatctgcatgattcggtgaaccaatattttcccattttctactaacacattagaaaatcatgcatgaacgacatccattaaaagctcaagattgatcaatggatttaaagttccaatacaataattttatttctatactttcagattttacactgaaacttatctttaagaaactgccatatatctttggtgtaacagcaaatatccacagttaactgaataggctattaaaatactcctcccttttccaactacagatctctgtaagttcagtttttcttcatatccttcaaccggaacatacagcaacaaaatgaaagtagacacagatacaaaaatataaaggtctcctgttgagccaggaattaaagaaatttgcaattcactcatgtttttgttttgagggtaaaattatttttcataaaaatgttatttgtgttaacatgaagcaaatttaatagttatttttaaattaattaaaccaatataacccacataatcaaaactctttagagccttcaataatttttaagagtatagatctgaggcccaaaaatgttgagaattgcttctctaatgccaaggtttggcaaacattctctgtaaagggccagacagtaaacattttaggctttgtggtccgtatggtctcaacctaaacaataggtacatgagtatgactgtgttcccataaaacttgatttccagaaatgaatgagggccaagtttgctgaccactattctatatccttacatcctatctgctagtgacttaaggatctagaagtagcatgctttctagtaacatttttactggtcattatttatacattcaaaaagaaagttaaaaaaatctattttgttttgttgtgcaaaactgtgaaaatttttaaagattcagttcttaatcataaacaaaattgcatttcaattttggctatctcaagtatctcagactcgtcactatacataaagaatttaaaaacagacttacaactggccaagtattaggatgttgtatgtaagaaaagatgatttatacaaccaaaaacaaaaattcctagttttcaagaaaaaaagattatgaaggatcaaaatgtctcacattttacaaatccaatggggttcaatgattaatataaaaccaacatatgtcctttccacacatggaaagggaaatgctgaagcaacagaaaagaagaatcccactaaaagaatcctataaacctttaaagacttcagaaaggaaacaagagaacatgctgctttataatccccaggcgaagagacccaggcttcaaggctgctaggaaagtctgccgggaaccctggtccatttgccaggaaggagtattaaccacaagacccttagggactcatctagtgcgggctcgggaaggcacacaaccgccccttctctgcaagcataggtgtaatgaatgaactagcacttgcaggcaatgaactcattccagactacccaaaccatctacaacaatgagtgcaccatgaccccattttccttttttactctccttaagcaaaaatggcagcatttatagtgttggcacatcctccacacttctcctctggggtacttctctgatgatgactgcctttccattgcatttatattctaccacttactgctaaaaagtcttggctaaatcttcaagattacaccactgaccatcaatgacccactatttttgctctgtatctctttcctctaattgttgggggcagagaagagtgatacaacttcttgattacgttttccttgactaattctcaatttcagattcatctcagcattccactggcattcccttaagtcctctctaccgcagaaaccagtccttttttgtaattaacgtacatcaatataattctacatttttttgttcaatcaatgtcccccactagattccttgagaatggaacccatatcatcatatgtccctaaaaactgaataatgatccgctgtctttcccttccaagtcagagtcacctcatcattttacctatagggagatagcacagcctaacaatgagagcacagattttgaaatcagacagacctaagatcacacccaagccccgccttactgactccatgatcctggccaagctacttaatgaaatgagattaaatgaaataacaaaagtaaaacatctaacccatatatagcagccaatcaacagatggccgcttttatcacattttttttttcaagacagagttccgctcttgttgcccaggctggagtacagtggtgcgatctcggctcacagcaacctgtcaggaaagggatgcatgaacaaaataacaacagaatcagagaaacagaactattaaaagtttctatttctagaaactctggagcttacaaatacaataatggaattgaaaaattcacaagaggggctcaacagcagacttgatcaagcagaaaaaaaaaatcagtgaacttgagtatagatcatatgacactataaagtcagaagagcaaaagcgaaaaaacaatgaagaaaagggaagaacctaatgggacaccatcaagcagatgaatatacgcactatgggagtctgagaagaacagagaaagggacatggctgaaaatttcccaaatgtgaggggagaaatggacacaaaaattcaagaagcttaagaaactgaattggataaagccaaagatactcatgctaagacatattataattaaattgtcaaaagtcacagagagaatcttgaaagcagcaagagaaaaatgactcatcatgtacaaggaagcatccacagaggatcagtgaatttctcagcagaaattttgcaggttgaagtaagatgatacaatcaaagtggtgaaaaaaaaaatctgccaatcaagaagactacatctgacaaaactgtcccacaaaatgaaaaataaattaatcccttcccaaataaacaaaagctgagggagtttgttgccactatgcctgtattacacatactaaagggagtctttcaagtctaaatgaaagaacgctagacggcaacatgaaaccacatgaaaatataaagctctttggtaaagctgaatatatgaacaaatataagatacagtaatattgtaatgatgcataaatcacttttaattcttttataaattttcaggctgggcaatcatagcagaaggtgaaagggaagcaaggcatgtcttatgtggtggcaggcgagacaaacagaggataggggaaactgccaaacgcttttaaagcatcagatctggtaagaactcactatcacaaaaagagcatggtggaaaccaccactatgatccaattacctcctactagatccctcccttgacacatggagattacaatttggattacaattcaagatgagatttgggtacggacacagaattgaatcatatcatacatcttctccttcccaagttgtctaatgtttcccataatgacaagtccatcagctcaagtccctgacatagagcacagtaccccaccaacatgtgatggatatacagcagcagcaagaaataaatgtgttgttggagttatttgctactgaaatacaacatagcccattatgactgatatactgctcatttacaaatatcaatagtatgattttaaaataaaataaatcattcactctaagtatttacattgttatttcctaagtactaattaatattaagtggttcaacacaatagttccaaaaatttgtgggctactagaaacatctgtaataaatctggacattcacaaagatgatttcatgtgtttactgacaacagactcatgtaaattgtctagttttgtcagtttcctaggccctatatcagagctatcaaaaaatacactttctaaaaattgattcgtttgtaaataattatgtcataatactaaagttaactgtatgcattttcaaattaaggacagcactaaaaagttaaactaaatgtaacacacaatggttgcaatcatgtatatttatgtatgtatgttttgaagctatcttaaacagacagtgataaaaggaaatatataatccaaagcattcattatatataacacaaacaactttatattaagttaggtttttctccatggtggtctatctttatactcctaaaggaaatcctcacttatctgtgtatgagcttatacccatgtttccattcttctagcatattcatctattttatttccaatgctaagaacaaaccaagataagcccttcaaacaattcaaaatcctaatgttatattgtagagaacagtgcatcctttatgaactagaagagaatctattctgtattagccctttatgtattaaacggtagagactcttacatttgaagtcagctatacccaagagaaactttaagagcactgcattgttcatacaccttttaatgtcactttcttcaataacctcaatttttatacttcatgaatattagctgctggaatctattgagtatactttgtaaatttttaatttgtatgtcatagctctgaataggagtattttcatttctacagtgaaacaaatgaacagaaaaggggaaaagttaacatttccaaagagttatgtaaagacggagcaaaaattaagttgctaaggaaagtaacatgccagtcattgtccaaaaaccacgggaaatggttacagaaaagagcatttcacagagctgtgcacagcctgctagtggactgctagccaaactctcttagactaacacaccctggaatgaatctatctgattaggagaacttactttatgaccaatttagtgtcaagaaatctgagggctagaaggggaacctggctgggaaaaacagggcctgctaagaccacatggaagccagctgtcagccacttcctattcatacactcccgggaggagacatgccctcacaagaaacggaaaatgatgtaaacgccaagcaggaggctttgtgcactccgacgcggctcaagtggttcaggtttcccgggtgtttccccaggtggcatcttctcagcttccttggcctccctttctaaaatctccctcacaccttcctaattccacttaatgatctttgcctgtgcccatcccaacttcatgagctatgcgtatttcactcttcttgtctagagtctgtcttttactagaatacagtcaatgcgatgcagggcataatgatgtttctgtcaatcacacaccacatatatggcagtggtctcatattcttactcttccctttctatgtttaggtatgtttagatacacaaatacttaccactgtgttccaattgccagaaatatccagtgcagtcacctactgtacaggtttctggcctagaagcaacaggctgcaccatgcagcctaggtgtgtagtgggctctgccatttgggtttgcctaagtgcactctaggatgctcccacaaggaccaagtcgcctaacaacaaatttctcagaacgtctccctgtcgttaagcaacgtatgacttacagaaactatgagagggcagggagtttggtctgcattattcactgctgaattcctggtgtcttagaatagtgcctgccataataatatgtggctccaaacattaattgaataatgaatgaaaaaatgaatgagtgactactggaattcctaccaattttagctatgataatattatatattttatatatattatttattttgtgtttctgcctgtcctcttcttagttctcctgtccaaaggaaaaagactgctaatctcattgatcacaacctaaaaatatttactagaccaaaagtatagtaggaaaactgtcaacaaattagatattaaaaggtcactatctggccgggcacagtggctcatgcctgtaatcccagcactttgggaggccaaggtggggggatcacatgaggtcaggagttcaagaccagcctgaccaacatggcgaaaccccatctctactaaaaatacaaaaattagccgggcatggtggcacacgcttgtagtcccagctattcgagaggctgaggcaggagaattgcttgaacctgggaggcagagggtgtagtgagctgagatccactgcaatacagcctgggcaacagagagagactttgtacaccgccaaaaaaggtcatatgtgcccagtccccttgacatctcgtgctcccttttccccgagtaagcagactctgctagtgccagtcagcttgccggctgcccactctcaccatttcactgggtttgggtcacacttgtgctggctgcgtgcctttctcacacaaacttctgctgacctgggcttctgatatgataagagagcctgcaccttcccctggtgggaggagcctagcccactcctctctggaatggctccacttctcttctcgcatggagaagtctagcatgggccattgttttagccaagaatgatgtcctcttcaacttttgtgcacatttgaaatttttgttgatgaaaaaagtgtccttttcaacattttgatttaaaatgtaatagcatttactatatatccatctcttgaaagtctcaaaaaaaaaaaaaactgtagaaagaaactattatataaccacaaattactaacagtaaaagcaagcctttgtggttctcctattggatgtaacagaacccattatctataccaccaaattctaactttcctgattttatttccctaaacatctctctcctaacatcctttgttttggagagatgctcaatagagtatttaggggtgtcaagtaatggtgtctgtaatttatgcaaaaatacttcagcagagaggcggaggagagggagagagaacatatggccaaatgtcatctgttgctggatctaagatggacatatgggtattcattgtactattctttctacttttctatatatcttgaaatttttatgctaaaacttttttaggggaaaaaaagaacttccacatctcccagcctcttatatcccagaattatgtgccttctgagaaccctaataagcccatcggcaaacacagtaatcctcaaattggtctgttcccacctccaacccatcctacacaggctgccagcatcatctttcaaagatccttacgtgatcacttgactactctaaataaacgagctgatgattcaaccgcactttcatgataaagtttaaattccttaaattgagacatgctcttggtcctttcttattgctttctttgcaaaaatcacaccaacaccctctctcaagttttctataaaactacaaccctgaacacactgtgttatttcatgcttctttgaatttgatcactctagttcctctgcctgcttcaaaatataggtttaattacatgtatgttaccacactgcctaatgaggagcctgtgagcaaaaaggatcataatagtaagtataggtgtcaacaaagtctaatctataaagtcatacagtctttttcaaacctgcatatgactattcagcaattcctttcaaattcagtagagggtgccatgatttaatttttaaaaggaaaatggaattcatgttaacaaaggcaactttcacaagctttagctgatgtgttaaagctataaaaaatatatttctaataagtaaggaatgtgaaactaaaaataaacacccaacattgtcttaatctgaacaaataacatatttttgatttaagaaagaaccatataagaatacatcaaaattctggttgggcacagcggctcaagcctgtaacaccagcacttcgggaggccgaggtgggcagatcacttgaggtcaggagtttgagaccagcctggccaacatggtgaaaccccatctctactaaaaatacaaaaattagccaggtgtggtacatgcctgtagtcccagctactcgggaggctgaggcaggataattgcttgaacccgggaggcggaggttacagtgagccgagatcgcaccattgcattccagcctaagtgacagaacaaggccctgtctcaaaaaaaaattaaaaaaataaaataaaataaaaattctaattgtgattataccctctgaaccaacaatagcttgtaggaatacaccctaagaaataatcatacaagtatgcaacaatgagccaatcaatctactgtaaaatataacagaaaagtgttcaagtttttaaagaaagtatcttcattgcagagttactacttcacttcactcacaatatcaacacagaactgatgcaggcacaggtattccgacttcaatacaccaacacaggaggcctctattccctggcacctctttattcacttttgccatttagccaggcaggatagcacacacctgtagtcccagatacttgggaggctgaggtgggaggattacttgaccccaggaattcaagaccagcctgagcaacacagtaatgacccccatctctaatatatgtatacttaacaacaacaaaaaaaaactttttccatttgtttcactttgggtcttctaatctatactttcctacgctaattcctggtccatttttagtttttcttttgcagtttcagaaaggtgctaacaatcagcagtgactacacttgagacaagacaacagacctcaaattatcggttactgccaaaatcaatcttttcattttgtgacttagcttatacattgcttagttatcaaatgcttatcaaactcctgtgattagcaaagtactatgtcaggggtataacaaaaaatatcaaactataaacatagtagatttcattatcttaagatcaatttcacttccaaaattcagaatctatgagtctagattgtattctgccgttttactcattaacttcaaggatttgggtaaacggcgacatgtcacacactcagagtattccatagtagggcattcccccacaggggaatcactgctacaatcactgctcaatttcttccttacctgaaaggaagccaagatggtactgaacaagaatggaaccaccacagtacataggcatttatttagctttctgtgaagcattaaaaaatcagatattgctcaagcctgggttgtaatatgaggaaactggcattaaccctcatgcattcagtctctccatctaggtcccccgttttctagatactctcactgttttcttcaatatgtgaaaaggcaagaagtacacctgtatctaacatcatacagaggcgttaaaaggcaaccagatgagatttttttttccatcttggcaaaatcaactcttcatagcggacattcaacaggctcttagaactgtttgaaatttgaacctatttaagtaacatcaaccagcaaatatttctcctgataataaaagcttccatttctgacatccacgtgtggcagaaattcccactccttaacagctgcaagtttattctctgtgtcctagaaagggtcttttctcatctgcatttctttttttttgggaggggggggcggagtcccactgtgtcacccaggctggcatgcagtggcactatcttggctcactgcaacttctgcctccctggttcaagcgattctccttcctcagcctcccgagcagctgggactatgagcacgcaccaccatgcccaactaatttttgtatttttagtagagatgggttttcaccatgttggacaggctggtctcgaactcctgacctcgtgatctaccctcctcggcttcccaaagtgctgggattacaggcgtgagccacgatacccggcctcatctgcatttctttaaagatcagaatggtttttgattcttggtaaaagatgagctggcaagtgggaaattactgaaatgccaagtagagttgccggccaaatatgagctggggagtttaagactaacgaggatttagagctttaaaggttgctgagtaagctcaagtagtgagcccgacaaatgtaaaacagaaaaggagcctacaaaagatggactgacttctctgcagccggagaaccagggccacactccaggtttggattaatcagaaagaggaaaaataacaaatctgtgctaacactatttcaacatcaaggaaacctacaagcatcaggatgtagaaacagtgtttactaatatatttccttatagttgataggtcctatgtagattcgtgaaaaatcatcttccttaatttctgcacattacacaaggacaaccaagtaattgttcctacttgactgctcaagacatcatttctcaattattaaaaagacatacttttggccaggcacggtggctcatgcctgtaatcccagcattttcggaggccaaggcgggtggatcacttgagctcaggagttcaagaccagcctggtcaacatggcaaaacctcgtctctactaaagatacaaaaattagccgggtatggtcgggggcacctgcagtcccagctactagggaggctgaggcaggagaatcacttgaacctgggagacacaggttgcagtgagctgagatttcaccactgcactccagcctgggatacagagagagagtctgtctcacaaaaaagaaaaaaaaaaaaaaaaaaaaaaaaaaagacatacttttgctatatccattcttatgggaattacattcaattgcactataatctccttgaattaacaaaatgggacaatgtttcaaaagattctttttactctcctctaaaccatttgagaatatttctaaagccattaatttcacaaactagccaagattactgagaaaaatcatagctgtacaagttctgaaaatcttgctgaatataactatcttgtggtccaagggctgtatttctttgcctgaatccctgaattataaatggctataaaaagaaaacaggaaagaaaagggcccaacaaaataaaaggttcccaagtgaaaagtaatgatgttatattgtaacaaacattttggtgactgggattacctgaaacctctgggctcctgctctgaagtactaatttgccaaaagcatggcaaatccaactcttaaaacagtactgactcatcctgagttcacagcttgatcttatctattttaatatcaaggaatccaagatttgctatgcctcatatcataaatgaaaaggaaatactgaagataattacttaaaacctatccaacagaattatcttcggtgtaagttttaagtataatgcagataaccacaatatagatttatctcaaaatgaaaacctgggcagatgatatttaactgagtaattatgttatctgcactctagataggaagggctgagaggaaaaacagggagaaacttgccatcttactcacccgcagtggagtgctggctgtaaatcaagtcggcctgcccaaacacacacaggacttaatgacgacctcagtgagagcagttgagtttatgcagtaaggaaatctgcacaaaattaaagggaaaactactgaggccccacatggacataatcgctacagaccgtggatgtgaaaatgatgacataatggtggggagtaggattccagtaggaagctaataataaaaatacatttgttataaaatggaaactagaagttactgaatttctagcattttcccctgttgttctctaaatgtatgcactcactctaacatagtgcaaacatactttgaaaaaacaaatgtaaagaaaagggataggaactcatcttttctgtcacccaggctggagtgtaatggtgctatctcagctcactgcaacctctgcctcccaggttcaagtgattctcctgcctcagcctcccgagtagctgagattacaggtgcccgccaccacgcctgactagtttttgtatttttagtagagacggggtttcaccatgttggctaggctggtgtcaaactcctgacctcaaatgatccaccctcagcctacccaaagtgctgagataacaggcgtgagccaccgcctggcccacctttttctttttttttttttctgcaacggagtctcactgtcacccaggttggagtgcagtggcgtgatcttggctcactgcaacctccgcctcctaggttcaagcgattcttctgcctcagcctcccaagtagctgggaatacaggcacgtgccaccatgctcagctaatttttagtagagtcagggtttcaacatgttagccaggatggtctcaatctcctgacctctttatccacctgcctcagcctcccaaagtgctgggattacaggcatgagccactgtgcccagcccatctttttcttaattctacatatttgttactgaaatatagtttcctagtcaattttaacaaacaaaattccaatcacagagtgcaatgaaatacctatgaggatccaggagcactctcaggtttatggactaactatgaatatgtcaagtactcattagtggtatcctaaaaagtttgtagagaggcactgggaggtgaagaggagagggaagagaccatagtatgagtgttttacttcctttatacttagtgaaatatacttcatacaaatcatcctttggaactcatggaataccctgaaaattctactatctggaaagacatacatggttaattttctttgctctgacaatcaaaactgtgcctacctgaggtcaacagtatactaggagtgtgaaaagggaaattttggaatatggaacaactttggagagggaatttctagatagggaggatatgaagacagcagcggctcaaatggcagagagaaaagttaccaaggtcaaacaccactacccagacactttctatataaaagacctatgcagatgctgtagctaaaccattaggactactgccctgcaactccacattgccatacattttcagttgctttcagggaaaaaaaaaaaaaaaaagcctattaattctaatattaatatgaattccaataacagattaaatgcacccccagaaaaatactccagccaagattctacttctaagaatttcactgcagacataattcacacaggtaaacaaatatatatatgtgcaaaaaaactgactaagcatcattagacaggaaaaaaaagtaatgacctaaaatgttcatcaatcaggcaatggttttaaaaaataataataatgaaaagtggcacagggaggaggatgggatataaaattggactcgtttttaggctataatctttctacctttcttatttcacaatgagtatttattcaagtcttacgtatataactaagaacagaaaaatcatacattctattaattttttaaaattcaaatggcaatcatggcccacagttccactgtaagtctcaaagcctatttaatctatcattgtacgccatccatttatatgagaatctgtgtgtctttctcctccattagactataaattccttaagaaccaagacaaataataagtcatcttcccccatgcccagtacagagatgctcattcaatgtatgccgagtgagtaaatgaagagacaaattcctatttgatctaagcctctgcaggtaaccacagttggctacagtcatgattacaagtgctctgagttatgtcagcctgacccacagaaaggagaaagatagttctcagaaacagcataagtttcaacatattccacaatccctgagaaggttctaggctacctacatcaaacctatccctttccaagatcacccacagattaaaaccaatgacagcagttgagatgtcacagtattaaaaagcaacaagcgcaattcagcgtttcatgtcatgacacgaactggaaataatatcatttatctggtgcctgggagggaaggtctgagcttggtgaaaccaatcaagtatgtcttccttatattctttaattatgataaggaaactgaaaaccaacatattaaggaagatattaaacacagaatttatataaaactcccaaagaaaaccttctcagatatcttcatagaaaataaagcttgttcatgtcctttgtagggacatggatgaaattggaaatcatcattctcagtaaactatcgcaagaacaaaaaaccaaacaccgcatattctcactcataggtgggaattgaacaatgagatcacatggacacaggaaggggaatatcacactctggggactgtggtggggtggggggaggggggagggatagcattgggagatatacctaatgctagatgacgagttagtgggtgcagcgcaccagcatggcacatgtatacacatgtaactaacctgcacaaagtgcacatgtaccctaaaacttaaagtataataaaaaaaaaaaaaaagaaaagaaagcttgtttccatgaacgtaactcttttttataacaggttctatgtctgtaatagctacatgcaattcctgatcaatacaatgtgatatctccacatttctgacaaacccccatgaacattaaattttgtttaatggggggctctgttttggcttctcaatgagaaaagggcagacattctgcggggagtaaatataatcatttctaggtaaggtattacagtcctgtgctgacaccttacagtacacaaataacataaacatacacatctgcagaacttgacaatattgagtatttatgcagctattatttcacacttaacccacaccttctaaggtaggttacacctccattccatccttcccatcccagattctataagaaggggacagacacaagtctagaacccgatgttccttccacttcgtcacactcctgtcaccttttcaagtagagtcaaggtgagaccaccaagaagacaagaaaggttaaaaaaaaaaaaaggcattgctgctattaataccaaaagtctacagtttgcctatatatactactatctagtaaatttcctattatacttaggactgataagatataaataacatattaaatattatatatatatatatatatatataaatttttttttgagacagagtctcactctgtcacccaggctagagtgcagtggcatgatctcagctcactgaaacctcagcctcccagattcaagcaattcccctgcctcagcctcccaagtagctgggattacaggcatgccccaccacacctggctaatttttgtatttttagtagaaacagggtttcaccatgttcaccaggctggtcttcaactcctgacctcaaatgatctgcccacttcagcctcccaaagtactgggattacagacttgagccaccgcgcctggcctaaatatatatttaaataaaatatattacattttactcctattagttttactaaatggcaattacaggtatccaaagaacatttactgagcaaccaccaggcactatgctagaatcagagatatcacagtgtatctcctgtctctactcctgtggagtgggagagagagctctccacacagtggaaaaacagaaatccctatttctgtgaaaacaccaagttattactgcactaaacagctgctaaagggaaaaaagaaagagcctttgtgtaacatgtctcagaacttttactcagagaatgagaaggctcaggactcaaacttacaggtgaaactgcacctctaatgtagacagcccaccaccattcatcctccaccaggtttttttttaactctaaaatatattaatgaatttaaacagaaacagctgtttatcagtcacctaaattagtagttctcacacttttgatcattcatatgccagcctcacaatttttacattacatacaaaactacttttttacttaacaattttcttacacagagttattttatttaaatacctattttagactccttttaaatacctacagtgaggccaggtgcagtggctcacaccagtaatctcaccactttgggaggtctaggccagcggattgcttgagctcaagagttcgagaccagcctgggcaacatggtgaaaccctgtctctgataaaaatacaaaaaattagccaggcgtcatggtgcacgcctgtagtcccagctacttgtgaggctgaggagggagaatcacttgagcccaggaggtgggactgaaccactgcagtgagccgagattgcaccactgcactccagcctgggtgacagagagagactccatcaaaaagaaaaagaaaaagatgaggggagggggaggggagagaagagaaggatgcagggaggcaggagatgagttagttatgttttctaatatgcatgaaaataaaagcatatgggcaggtgcagtggctcatgcctggaatcccagtactttgggaggctgaggtgggagaatcgcttgagcccaggagttctaggccagagcgtgggcaacatgacaaaatcccatctctacaaaaaaatacaaaaaattagccaggcacggtggtgtgcccctgtaatgccaactgctcaggaggctgaggtgggaggatcacctgagtccaggaagtcaaggctgcagtgagccatgattgtgccactgcactccagcctgggtgacagagcaagagtctgtcactctgtcccccataacaagaaaagcatagtgcttaaaacaaaaactcttcattagaatacttcagaaataaccctgcatgtccatacttaggaaacattgatatttaacaaaacaaacaaaaacacagaaaacactatattagcagctatttataaatactgttacaataattttatggcattatcatcatcgacatatttgagtccatccctctttctacttgttaattaatacatgcttaattatctaaaaagtattcaatcatttccagtggcaattcatccattccagtctccctggctctctataaatgatctatgtattatattatgtattagtctatatgtatgcattagttaatgatctgaagcagttatacaaagcttccttatacctacagactataaatggttctttccttcaatcacttgtcaagataaagaaatctaaaacatatgaaaataccagagactatatttaactatgttctaaccaaatagtatgtttctggccaggcatggtggctcatgcctgtaatcccaacactttaggaggccaaggtgggcggatcacctgaggtcaggaatgagaccagcctgaccaacagggcaaaaccctgtctctactaaaaatacaaaaattagccagacatggtggcacatgcctgtagtgccacctactcaagaggctgagacaggagaatcgctcgaacctaggaggcggaggttgcagtgagccaagattgtgctgctgcactccagcttgggtaacagagagactccatctcaaaaaaaaaaaaaaaaaaaaaaaaattttttttaaatagcatgtttcttctggcacaatttaaagtgaaagtgaaaaggctctgttttctacatgatgcatttcaactcagtgtgagttgatttattttatgcccaattgatgttagagaaagaattcaaatggtttttccaagtatgtaaggtgcctacaaaattacactataaaatttattctttaatagcctagttctttaccaaagcaattagttttcataagtcactccagcaaatcacaaagccagatgggtccccaattcaatcaattatctttaatctttcaactaagaaaaattgctctttatatactttgtctctgtagttctctttccagaattaaccattttggcagtgatgtatgcttgttagcaaaagtagatcctacacacaggtgagaaaacacagaattaactgtgaacactttccttcctagcaaggtgagcagaacactgaaccatgacttaacgaaagactgcccaagtcattcactggggtggaaccctatggtgtttatcacaaacatacttcccaccaacacggtggctttgcgctccactggccagtgctttttatattgaaatgagtcaaagaccagatccagcgcagtcaccatagttccactaagatttaagcgaggcaaaccattgtccctgccattctatcctaaatgtggtcataagtgggacagcagagaaagccacagtacttatccaaggttgcaacacctccactcttctgctgacctccaaatacatacctaggcagcacagccttctccatcaggtgaccccagagtacacagagtgtggatatcagacacaccccaatgacaatgacgtagaacaccctccaatgtagtacaagaaactgatcatacaatatactcacaaatacatttctctatcctgagagagagaccggtttatctcactttctatctctccatttataatttttggccaggtgccaatggctcatgtctgtaacctcaacactttgggaggccgaggcaggaggattgcttgagcccaggagctcgagaccagcttgggcaacataacaagaccccattatggctcacacctgtaatcccagcactttgggaggccgaggtgggtggattgcttgaggtcaagagttcaagaccagcctggccaacatggtgaaaccccatctctactaaaaatacaaaaaattagccgggcatggtggcgcacacctgtagtcccagctactcaggaggctgaggcaggagaatcgcttgaacttgggaccagaggttgcagtgagctgagaatgcaccactgcactccagcctgggcgacagagcaagactctgtctcaaaaaaaagaaaaaggaaataaataaataaataaattatatatatatatatatatatacatatatatatatatatacatatatatatatatatacatatatatatatatgtatatatatatatatatatttttttttttttcttcaccatgttggccaggatggtctcgctctcctgaccttgtgatccaccggcctcggcctcccaaagtgctgggattacaggtgtgagccaccatgcccagccaataatataatttttgactgaactagtaatttataatgaaactaacagtatatcccaaagaggcacaatgcattaagccagtaactgcaagtccttttaaaaagttgtcacaaatattttaggttactacacaggtgtcataaataatactctagtataaatggcctttggccctttggaagccacagacattttttaatctgatgaaaactatggatcctttctttcctaagaaacattcgctagttacacaaaaagctgcacctattctaaacaggttgtacattcattagactctaaagtccaatcatgtacacagctcaggaactcttacttgagtggcttgaggagactaatacaatgctaaatctcacatttagccggacgcagtggctcacgcctgtaatcccagcactttgggaggccgaggtgggcagatcatttgaggtcaggagttaggcatgagcctgaccaacatggtgaaaccccatcgctactaaaaataaaaaaattagccaggagaggtggcatgtgcctataatcccagctactcaggaggctgaagcacgagaatcgcttgaacccaggaggcggaggctgcagtgagctgagttcgcaccaccgcactccagcctgggcaacagagcgagactccgtttcaaaaaaataaaataaaataaaaataaatctcacatttaaaaagaaacataatgagtctacctgcactcaggtgtctaagtacctgaccacatataaatcagaggcaataataaaatattttaaagaaaacccaaatttctctggtggtagtgtattcaaattgctttcatctaaatacgctgagtgaaagggccactaccatctggtagcagccaatcttgaatttaagaaatgaggaatgtgacctgatgggcctggggagggtaaagtcacaaggtttgaagctgtgtttgcatagttctgcaaataaatattcagaacacggaaactgttcatgtcaaataaaggaggtggggtattacagaagggataaagccccaaaagtgtcccccgaccttgatccaccactgccagttggctcttaaaagttctacagagctacatttttcccgtcaatgtagattgtgatgaaaaattaaattggctcatgagccatatacagaagacttctaaaatcaacactgaagtgtttccctttctcaggatttggctgtgaagcgtgaccaaccaagccaggaggaaggggagggatcttggagctggcccacgatctgcaaagaggaaaggatggcaggggaggggcagagaggagcggcatatctcagctcagaagcagacggaggagctgcagctgaaggcgccaggtgaaacatccgacacatgtgggaaccttagtggtgatgcaggcaacagcaggtaccagaatttccaagacacaggaatagtatccaaatctcacagatggaagatagcaatgggaagtctggcagcttgggagtcaggtagggaaagcgttctagctccatacccaattccagaggcagagcttcaatccccagaaaaaagaaagtttgagagataggcacagtttcaggaaccaaataaaaagccccattctaggccaggtacagtggctcatgcctgcaatcccagcactttgggaggccgaggcaggatgaacgcttgaggccaagagttggagaccagcctggacaacatagggagaccctgtctctacaaaaaaattttgaaaattaaccaggcaggatggcactcacctgcagtcccagctacttgggaggctgaggtgggaggatggcaggagttcaaggttacagtgagctacgattgcaccactgcactacagactgggtgacatagtaagaccctgtctcttttttttaagtctcattttagctaaaaattggggcaaagagcagcaacagggacaaagaggagcatcagagccaggaatgactggcaaaaaaataaggaaaaatgcaagaaatctagtgcccagccctgagaccacagatcctcaggatggggcgctggtggaccagaaaccccaccacgtgagaaggctgcactttaaattagaccgtcctggtgtctgccttggtcacaaaattagagtggagataagcaacacagacaccagccctggcctcagggagctttttttttttttttaaataaaatataatctcaaacgatcaaagaaaaagacagaaagtctgactgaagagcccaagcattaatttccaccatctctcaacagcttgagcaaacatatggaagtgggaagcacagagcatgtgaaggaaactgtttattacagttgggataaaataaaaggtaagtgttggaatgaaagaatgatttccaatgctggcctaaggattttatggtggcggtgggtaaaaaggacatgttcagaatggtgtcttggaagattaattcaccagtaccatcttagaagccaaggaagagagactttcaggaagaaggcacagtcctcatctccaaatgctgttgatattgagaaatataaaaatactaattagaaggcatcctctctaccagtttcattagtggagattatagggtagacagacaggacaagggcagaatcaattcaagagatagaacagtactcaggatgcacctcccattgaggaagttatgtataaaaagagacaagagataggtccctgagttcccatcagaggtattgcttttactgttgttgctgctgatatttttaaaaacaggtagacctgagtcaacaggttaaagatgcaaaaacgagaaggggtaattgataaagaatgtttaaaagaacagaattatgagctcagctcatatcaaaatgcatttacgctgggcatggtgactcaagcttgtaatcccaacactttgggaggccaaggcggggggactgcttgagctcaggagttcgagaccagcctggggaacttggcgaaaccccatctccacaaaaaatgcaaaacttagccaggcatggtggtacatacctgtagtcccagctgcttgggaggctgaggtgggaggattgcttgagtccagggggtcaagaatgcagtgagccaagatcatgccactgcactccagcttgggcaacagcataagatcctgtctccccaccccacccccaaaaaatgcctttacatcttaaaaaaattccactttgaaactctttttccaacaaatggtttctcagtgtaaaatgtctataaattattcagtgttgataatgtgtctgttccattgttcaataaccaagaaatacatatcatagcttttttaactttatcgagttaataaatgttggcacaaactgtgctttcttttaatgaaatccaataagcagagtaagtgcagaggaaagggaaagaatgggttttaggattatccagacctgggtttaaattatatttttaagagcaaaaaaactacattattgcttgaatacttaggtaagcataagtacttacatgctaagggatttacaagactctctcatctgaccttcacaagggccttctgttctgttttgttttgttttggagacagggtctcactctgtcacccaggctggagtactcaggaggctcactgcaacctccgcctcccgagttcaagcgattctcctgcctcagcctccctagtagctgggattacaggcgcccaccaccgtgcccagctaatttttgtatttttagtagagacgggttttcaccatgttggtcaggctggtctcgaactcctgacctcaagtgatccaccctcctcagcctcccaaagtggtggaattacaaacttgagctactgtgcccagcccacaagggccttttcagtttagaggttcaacaatttacccaagtcaataaagaagtagagcagggatctgaacttgagcctgattctaaagagaaatgctttcacggtcctcaaattgtaacatcaagctctgccacctcccacaacttctgcgcttcaggtcctcataacatatagttttgccatgaagaattagaaaaagttaacatatgaggcagaaggatctcttgaactcaggagttggaggctgcagtgagctatgatcatgccactgtactccagcctgggtgacagagtgagaccctgactttaaaaaaagaaaaaagaaaaaaaagtgaatgcatggataacacaacagagagaagttcctcaatagatgctggtttccttatctccttcctgtttcatttttgtaatcactttcttaaaaccttgctctttctaagctatggtgctgtctcttctatgtccctctgacaccatatgtgtaccccaatcagcattgtccccatgttataattgttagcttgtctgtttctcaatagtcagtaaactcttcaagaaccacagcctttgagcatcattaactttatgtctctagtttccagtgcatctggcatgcagtaagtgctcaataagtgtttcttgttccaactaattctggttaatatttaatccaagtgtgctatctgcttaggttgcctctaaaaccttagtcactaggcccatcaacattgtcacagatgtcaaagagctaaggtatgccgtgtgccatctgttctgccatatgcgttagttcgggggcctaaaaactacagcaagttggcccaccatctgttcctataaataaagttttattgaaacacagccaagttcattcacttatatattgtctacagctgcttttatgttacaatggcaaagtggaatatttgaagcagagaccactggacctgcaaagcttagtacattgcatctggcctttacaaaaaaaatatttgctaacctctgcattagttggatccattcagtaagttaacaaatattagaatatttactatgaggcaattgctgcctttagatgctgggtatagtgtggtgaacaaaacaggcacatccctgaccttcacagagcttataatctagcaagcaaaaaagacaacacactcaggtagtcaaataaataaacaaagaagcaataaataccacaggttgagcatctctaatacaaaaatctgaaatccaaaatgctccagaatccaaaattatcaacatgatgctcaaaggaaatggtcactagagcattacagattttggattttcagattagggatgcttgagcaactggtataatgcaaatattccaaaagaaaaataaaataaaatccagaacacttctggtcccaagcatgtcagataagggatacccaacctgtataaaatgtgatcaacatggtaaaagaaaagtagataatactatttgaaagaataacgagccaggcacgatggctcacacctgtaattccagcactttgggaggctgtggcaggtagatcacttgaggtcagcagtttgagaccagcctgggcaacacggtgaaactccaactctaccaaaaacacaaaaattagccgggcgtgctggtgcatgcctgtaatcccagctattcgggaggctaaggtgggaggatagctgggacgtgggaagtcgaggctgcagtgagcagtgaagtaccactgtactccacccaggctggtgaagtacacccaccctgcctcaaaaaacaaaaacaaacaaacaaacaaacaaaaattacattaaaataaaattaaataaatgaagaataacaaatgtgagtagagaggaggcatactctatattgggtagaaggtgaagtttctctaagcaggtgcaattaagctcagccctgaatcactgtggggcagggaaccgccatgtgagagacaagggcatccggcagaaggtacaagaagaattcaggctgggaagaaggaaagagcccaatatgttctaaagaagatgtggctggaacaaaatgagccagagaaattttgataaagaaggaactgtaggcaaaggttacatcatagagtacgttgtaagccactttaaatctgaattttaatttttacatttttaaaaaccatttttattataaagacaattaggggccaggcgcggtggctcatgcctgtaatcccagcactttgggaggccaaggcacacggatgacttgaggtaaggagttcgagaccagcctggtcaacatggtgaaaccccgtctctactaaaaatacaaaagttacccgggtgtggtggtgcacacctgtaatcccagctactcaggaagctgaggcagaagaatcatttgaacatgagaggcagagaagattgcagtgagccgagaatgcaccactgcactccagcctcgatgacggagtgagactctgtctcaaaaaaaaaaaaaaaggcaattgtagaaaatggggctaatcaggcgtggtggcaggcacctgtagtaccagctactcgggaggctgaggcaggagaatggcatgaacccaggaggcagagcttgcagtgagccaagattgcgccactgcactccagcctgggcaacagaccgagactccgtctcaaaaaaaaacaaagaaaaagaaaatggggctaatattatagactcatgaaactactcttccttcaggaatattcatgaatatatacagcaaatccacctgtaattacatacaccttttactcaaaagtaaggactttctttcccataactatttctacttccttaaacattttgattacttatgactgaagccatggattcagtgtgatataaatactttacgtctctaaaaccctgctcatctgattgatgcaggacctttgggagaggcaggtgaggaacatgccctgctatcctaaccccattgctccagcaaagaatagaaaaggagaacaaattagctcattcaatgccatagcctcaatgcccagatagtgatgacaacagtgaatgctcaacaaactgaggtcgattttaactcaattctcttctaatctagtccaaccttgcataagcataaattgggtagtgattatgcccccaaactcttcagctattaccacaaaagaagccaatccatcatcattctaaagtaaatctccaccaacattaaatcttcaattggctggagaacttcaccttcacagtttgaatatttgtttttatctttttttttttttttttaagagatgagatcttgctctgtcacccaggctggagtgcagtggcatgatcaaagctcactgcagcctccaactcctggcctcaagtgatcctcccagctcagtctcccaagtagctgggactagaggcacgcaccaccacacccagctaatttttttaaatttttttagagatggggtttcacaatgttgtctaggctggtctctaattcctggcctcaagcgatcctcttgcctcagcctcccaagtacaatgtttgaatattttaaacataaaattaataagtagtacttcaaagtacataagattagatcattttccttcaaactttgatgaacagacagtgcttaagatcggggtattctgcaaagacaggatatcaggacagaaagagacctgagttggagttagggaatgtggagtctagacctggttttactggttctcttaaaaacagcaacatggccgcagccagtcccagaatcccctaggcctctgggtatccccaaaccacaggattcccaagaccgcattacggcttcacatgcaatgacttgtaggctggtaaatgccacgagactaagatggcgcgttaaaagagtgacaagcttgaaggatgatgaggtgtttgacacagtccttacggaacgggaagattttcacaggcataaagctaaggtcaaggcaaatctcagcagagagaattgctgactatgctttcattcagcaaaacatcacagtggttctcctctaatgcctaatacattgacatggttataatcacaatacacagcagcccagcagttcagaagctttaaatcatgtttaaaactattgttttaattgaaggggagtaggaggaagccagggcagtggcacccacctgtagtcccagtttcttggcagacagaggcaggaggatcacttgagcgcaggaattccagaccagcctgggcaacataacaagactatctctttaaaaaaaaaaaagggggggggggaggaggggagctggggagggggcgcaatctacatctattgctgggtggggaaaggcacgtgtgcctacttcagttctatctgcagcgcctgttcaacatcaacgccctctatcctcgttttcttaaacatgcagtaggaaatggaagcaaaatatttatcattaaaaatgcatgaaaatgttaaactgtctttggggaacttattaaatcagagttcatcagaaacctctggctgtaatgcctaggctgctgtttttgaagagtcttgaagcctgagagctctttctgaagaccacggttctttgaaatagcgcatgttgcctttcctccagggacattaaatgatgatgggatctctcagtgggactgccccagccatttgttttttggactttttagtacaatagtaagctaaataattagctggtgatgtacactgatctagacccataataattacaggcagaactgttgtaccttgtcatgaccagcaactggtgtgttttaatttttttaagaattatatcaatcaaaatggtttgtgtgcataattcgaaacaatacaagaggtcccaaatatggtttctaggcaaaaggaagttaggcaaaatttgcaatgtatctttccatctttgcagatgtgctgcctatctttttggaaggagcagagaaaccaaaggaatatttcatttaaagtcagacaacagtcacatctctgaaaaacatttgttttacttgagaagaaaaaacattaagtgctgggacaacaggatttataatactatcacaggatttttggagtattagccattgcaacacccactaatatcacaccagctaaaaattcagcaaaagcttgttggtatgccaatcaaatatgacataaagacactgttctcttgctaatctggcttgatgcaggagcataatttgaaataccttgtctaatgtatgaactgcagatccttcaggcactcctccctaaatattgcttctttcaagcaagatttccataaattttgaaaggtagggagccctgtttgtactccctgggaaatgtctggagagtacctatttgaaattcatagatatatagacagatgcagctgccttaacatgcagtctaagggcaattaaaattcttctgtgaggcctggggcagtggctcacgcctgtaatcccagcactttgggaggctgaagcaggtggatcacgaggtcaggagatcaagaccatcttggctaacatagtgaaaccctgtctctactaaaaatacaaaaaattaaccaagcgtggtggcacgtgcctggagtctcagctactcgggaggctgaggcaggagaatcacttgaacctgggaggcagaggttgcagtgagccgagaccatgccactgcactccagcccgggtgacagagcgagactctgtctcaaaaaacaaacaaaaaaaagattctggggcacttacaaggatgcatgtttgaataaaaagccagctcactgcagcttctgaaaagctgaagaagacaaggttcaatattctcctctgaaaatgaggcagactaatgaatgatcaagacccaacattctagtccatatagtttgaccatgagcacctaagcctgaaaaatacctgaagtaagactattcacccatcttcagccaaactaaaatgcacttttagattcgtgacttagatcaaagtttcttcctgttacataaaaccagggaaaattatttgtaaaatatataccaaaatgtgctatttacacaggtgtgtccaatttgtgaaaattcatcaagctctacacttaaatgtgcactttttggcacatattttacttttaatagttttacttatatctgtacatatattgtgtgtgcatatatagttatagacataagtatataaaataataaatagaggtaattcattaaggtattgatagaccctcaaataatgaaaagaagtgcttttcattggggcttttcatttaatggctagaaacatctctagaaagtaatttcattccagtagcaattgctaatgaataatcaacagatatagttaatgactcagtcaactaaacgtcaccttttcattaactgagttttcataaagatttgctcggatcttaattttatatacactgttgatttttaaaaaaatgtatataaactcttagtttaaaaaaaaagaaatggaacaggaggggaaaagtatatgtggatactgatgcctggagatgttggagtcattttttaaatttaatacacttacttattaagtcttactcacctgttactacttcctatgaagaataatgattttattatagaccaagtaaaacaacccaaaatggtttgttttttttgtttgtttgtttgtttttgagatggagtctcactttgtcagccaggctgtagtgtagtggcgcgatctcagctcaatgcaacttccactcctgggttcaagcgattctcctgcctcagcctccccagtagctgggattacaggcacacaccaccacactgggctaattttttgtatttttagtagagatggggtttcaccatgttggccaggctggtctcgaactcctaacctcaagtgatccacccacctcggcctcccaaagttctgggattacaggcgtgagccaccacacccagccccaaaatgttattttaaaccataaacagtattagccagtattaacagttcaaaagcaatctggaatcatctaaaagagactacaagtcaatctgccctaaattaaccaggaagtcttttccatatcttatggtacaattacaaaagaattctatctagaaaaagaacacagcctacaaaagattaaaggcattcagatcaaggtgttttgtcaagatttcctaggtgtcctctttattggtgccgttacaaggtaagtggagacagacataagcaattgctcggcgtagcctctcctacagaagagttacctcaatgaactgagaacattctacccactctcacattccagcttactcacccacatctaccttcatgtttaagagcagcattcagagactataaaagcaaggaatttaagtcttctgctactttaaggcaaattgcatcaagaggactatcacaaaatgcaaacacgatgaaagaatttcctcttctttgcagaacgcaattattctgcattaacaatgtcaagttctgcattcactagacctcccagatttttattcttatccctgtataaataatcaaagctgcatgtatctcagaatgttgattagaaaatactacaaggcaggcatggtggtgcacacttgtagccccagctactcaggaggctgagttgaaaggattgcttgagcccaggagttcgagtccagcctgggtaacacagataccatctctaaaacaaaacaaacaaaggctgggcacggtggcttatgcctataatcccagcactttgagaggccaaggcaagcagattgcttgagtccaggggttcaagaccatcatgataccccatctctgtaaaataaaatttttttctttttttttttttttttttgagatggagtctcactctgtcacccaggctggagtgcagtggcgcagtctcggctcactgcaagctctgcctcccaggttcatgccattctcctgcctcagcctcccgagtagctgggactataggagccagccaccacgcccggctaattttttgtatttttagtagagacggggtttcaccggagccaggatggtctcaagctcctgacctcgtgatccgcccacctcggcctcccaaagtgctgggattacaggcataagccaccgcgcccggccaaaatttttttaaaatattacatttatagttatcaaagctccctaaactctgcccatattcttcaacaatcaaaagaatttcacacaacattaacatcacagaaacaaaataaataatatagtttcacaaaatttaccaattttctgatagccctctaataaattagaagattctttggctcccagaaccaacaaaacaaatgaaaaagatttatagggcaatcatatccatccacccagtgtttacacagtgcctacactacacagactaaagtatagcacagctcaaaccctggactacataggaggctgcctggatgacttcctctctacttcctgctacagaaaggttaaaaaatctaaatgcctctgaaaataaactcttcatcaccatcccttcctctggcttttttttatatgccatcaatttcacaaataatgagcaaaaataagctactctcattatatgactttctagtcacatttaatttgctttagttcaattttatccttagattctaaggtctcaagatggaaactagacagtattcacctttgtatctgcccagagcttaacacagtacattcaaatactataatcagaattcaatacatcttgatgaaatcggcttaaatgtccatagtccagatttagtaaaaggcattgttgaacctgaaaatgctgccactaaagaacaagaaatttggctgcaattatcacctttaagctgacatctccagttctctgtccctaagctagacccaacatataaccatgtgtcatcttcacttaatgtgtaggcatctcaaacacaacatgtttgaaaatgaacatgtctttccactacctccccaagacgtgctcttctgccggataccctcttctacatgaacggcatgaccattcacctagatgcccaaggcagaaatcttagatgtgctgttgagtcctatctctcccttacctcttacatccaataatcactgtgtcctgtcaccttcctaatatttcttttttttttttttcatacagagtctcgctctgtcacccaggctggagtgcaatggcgcaatctccgttcactgcaacctccgcctcctgggctcaagcaattctcctgcctcagcctcccgagtagctgggattacaggcacgcaccaccacgcctggctaatttttatatttttagtaaagaagacatttcacagtgttggccaggctggtctcaaactcctgacctcaagggatccacctgcctcggcctcccaaaatgctgggagtacaggcttgagccaccatgcccaaccccttcctaatatttcttgaatcagtcttcttccctacatctgcattaccaccaacatgccagtccaagccactattctcaaacacctgaacaacctcccaaccaatctcacgacagagccattatgataggtctccaactcactggttacacagcaattttaaagagcaatctttaagttaaaaaattgtggatatgtgtgtatctgtgcagaaaccttatgtatctcataatcattatacctcttggagaacctagcacatagtaggtctgcaataaagatgaatactcacccatcctcttgaccaaaaaggccatcacatacttttttttttttttttttgagatggagtcttgctctgttgtccaggctggagtgcagtggcatgatctcagctcactgcaaactccacctcccgggttcaagcgattctcctgcctcagcctcccaagtagctgggattacaggcgcccaccaccacacccagctaatttttgtatttttagtagagacggggtttcaccatattggccagactggtctcgaactcctgacctcaggtgatccacccgcctcggcctcccagagtgctgggattacaggcatgagccaccgtgcctggccttgtcacatgctttttacaacaagtataaacattaccaagtagcaagctattatgaagacattaataaattttagcattggttaggctaccaaagtaatctaatatagtccagcccagatgggatttacagctgagatgagaaatagcttctatatacaaggtagcaaacaaacaagatgaaattacataaagacaaacagaacactatatcactgtaagagtctttgagtcggattactaaaggatcaatagaatgtaaacaaaacagaagacactacagatgaaaaactagggaggcatcacacatgggtgcgtttgttttcaggagcgcaagtcatgcacacgtaggtttgatatgaagggagaagaatcaaaggacaaagtcactgatctgatcacagaacaggtttatgtttggaaaagtttaaagctgaatattttgagaacagcacaatgtgaagaacaatgggatctgggtaaagggattaagacttgataggattaggaataatagccctatcgtttgactgtgccagctataggacttgacacatattctctgatttaaaaccttctacaggccaggtgtggtggctcttgcctataatcccagcactttgggaagccaaagcaggaagatcacttgagcccaggagtttgagaccagcttggacaacatagtgagatgctgcctctacaaaaaaaaaaattcattagcctggtttggtgacacacgtctgtgctcccagctactcaggaggctgaggatagcttgagcctgggaggtcaaggctgcagtaagccgtgacagtgtcactgtacttctacctgggagacacagcaagatcctgtctccaaatcaatcaatcaatcaatcctactacaaccctatcatctaaataccattactactgtctcagtttacttatgagggaactgagtccaatcttttggctttcctgggccacagtagaagaataattgtcttcagccacacataaagtacactaatactaatgatagctgacgagcaaaaaaaaaaaaattaattaaaaaaataaattttttaaaaaattaaaatcacaaaaacgatctcctaatgttttaagaaagtttaggaatttgtgttgggccacattcaaagccgtcctgggctgcatgcggcccatgggccgcaggttggataggcttgatttataacatatttaaggtcatacagttggcagaactggggtttcaatatagcaacctcagagcctttacaagtccacaaagaagtcctctgcaaacatgatgttatgcaaggaaagctttaaaacctaataacagggtacggggtaaaccgaaggctgcatatatacttagcaaagcagcagctgtagtaatctaggtcagaagtgagcataattagactagaatgatagtgatgagattagaatacaagagattatcgcacaagagaatgtcaaaggggaaaagagcaggtctgaaagtgaaaaattaaagaggtattgggattcgaaggtaagtccacggttccaaatcttagatacaaaaagaataatggtaccctaaacagaaaaggaatccatgaaaaagtggacgtatttttccatttttgatcttttgagtgacatgaagagctatccacgtgaaattgtccaacaggctgccagggcaatgagaccaaagcttggttagaagaacagggccagattaatattataaataacaattttatatccatgcatatttcttaaaccaaagagaatattgttttaatatagaaaactaacactgttaccaaaaaaagaaaaataaagcttttaatagcataacactttcccacacaataacaagttcccaaagtggccctagcaacagcactcctatgtatgttagtacaagtcaaaaactccctgccacctactcaagtcctttgcaaacgattccatacccactgcattatcttcgcagcatctttttggaacacaaaatattgagacagcctgctaaattgcatatggaagtttccaccaaacatcagactttcgacttactggtggtatccatttttaaattcctaatcaatttaaggcatacaaacaaagatttttaggaaatgttagaggtactgatggatttacatgagcaaccaggtacttacagaaaacacctgaagacaccacaaaaaactaaaatgtcatctggtctctatatcatcatggctagatattatcaaaatgatagatttttaaaagcaagtaacagaatgaaacacacagtgtatcatttatgttaatgaacatgtaacactgtataggtccttaaggaaatattcatatatagtaaaagtaaatttagaaaaagataaaaggatatatacaaattcatattaactacttctgagaagagagggaaataaaactggaaaggggaacaaagtatatttcaaacgttatccgtaacatttcatttattccattttttttaatctgaaaaaaaaaaaacaccaaaatgttaatggaggtaaaggtcatttattgcgttctctttgccattcattatttctgaaatgttacccaaattaaaaaaagaaggaaagaaaaggatccatatctcttgcctaatgaagatatcacatgaaacatatctgacatattctgcctgaataactccagggtgaacagggtgaagcaagcagtcaatctctattttggactcaacgtatttcttgaaatagaaatggcataattagcagatctaaatgctggtttgatctcccagagtgaatctacagggtgggcctgagctacgggcaagttctccagtggcagcaactaggcaagggcactaaggctcagtatctcctaaggaagctaagaggaagattcagaaggacgaagctactaaaagttctcccaaataaatccatgccttccttcctaacccttaattctccctgttccctttccaagtccttcctcaagtcaccgatagagacgttctgcaggttagtggatctttttccttctaagaggtgaatctctgattggtctttcgggtttgtcattggctcactacagaaatgcacagcatgctctttaagaatttcggacaggcgcagtggctcatgcctgtaatcccatcactttgggaggccgaggcgggtggatcacctgaggtcaggatggcgaaaccccatctctactaaaatacaaaaattagctgggcatggtggcacatgcctataatcccagcaactcaggaggccgaggcagtagaatcacttgaacccaggatgtggaggttgcagtgagctgagattgcgtcactgcactccaacctgggtgacagagcgagacgctgtctcaaaaaaaaaaaaaaagaactccatgcattctttcaatatcacttattccgcacaggcatcagggatgtaagtttaaggacggaattcctaccttcaaagacacgtctattaatttttcttccactcaatttcttagtcttaaaatgttcccaccatcaaacacaagaaaaatcaagtctaaactgtggctgaatgatcccttagaattattatgactgtcatgagccaaggtaagaacttgatgtgtgagatgaggctatctgaatggggcaaccacttaggaaggtctctgcctccctaatgtgcccaagccaccactggtaaaccaggacaatgagccattacagagaacaaggatgaatgcatgctcattcatatttgactacacttcttaccagccaggaattcagttcagcaactgccaagactgctatacctaacaggacaaaaataaagggaacattactgtgtacctgctctagatttgttttaggaacaatacgatataaagaagttatacagtcgttcctctgtatatgtgggcgaaaagtctcccgataccaaaacctactgattctcaagcccctgatataaaataacccagtgtttgcaaataacctgtgcatatcctcctgcacactttaaatcatctctagattacttacaatacctaatacaatgcaaatgctatgtaaatagttgttatattgtttggggaatcatgacagaaaaaaagcctggacatattcagtacagaaagaaccattcatttttttgttagtattttttatctgcagttggttgaattccctgatgcagaacccatgcatacaggggcctgacggtatagtgatgtcatatgcagtccaaatttcaggaacagaattccttttaacagggcttaggcataaaaaaaatggtgtgatttctagtactcttgactccagattaataaatagcaacagagtaataaagtttcccagaatctagactcctaaaggcaggctagggcgcagcctagaggaggtgcaacagccaagaccctgatcatctcagaccctgggaaagcgcaggccagacaaaggtcacatgcgacctccacataacagggtcaaaactgtcccatgagagacaaatgggcatgtgcctggcaaagcaatacagggtgccaatttagacaaaaagagaaagaaaaatgcatgccttgtacacattcctgtgtctgactagagtggagggtatgtaaaagaaaaacaagagtaatggaaaataccatatacaggcctcaatatgacaggctttgaaaggcaaactgagtaatttagactcagtgtggtagagtagatccaaagaataaatggtcatttcttctttttttttctttcttttttttgagacagggtctcactctgtcaccggggctggaatgcagtggtgcaatctctgctcactgcaacctctgcctcccaggttcaagcaattctcctgcctcagacccccaagtagctgggattaccagcgcacgccactacacctggcaaatttttgtattttttgtatttttagtagagatggagttttgccacattggccaggctggtctcaaactcctgatctcaagtgatccacccacctcggcctcccaaagtgctgggattacaggcgtgagccactgcaccaggcctaatggtcatttctaaaaaggaagatgacttctgtaccaacattctgtacacacaatgaagtggtaatgagtatctgctcaaagaaggtagcagcagtaactcagagagacaaatgacaacatgagattctatgagtaggaagagatgacaatatcaggttattgaccagatagcagagacagaaaaaataaaaacagcttttttagggtatttaccaacaatactgttaattaataatagcaattagcatttactgacctttggtatgtgccaggcactgcactaaatacttctaatgtgttatcggatttaattctcactaccaacttttgtggtaggtactctaattagcctgtttcagttaagaaaatggaggtttggagagaataaataacttgtctaaattcataaaaccagcaataagcagggctggaatttagaagccaacatgtctagttttacggtccacattcttaaccattaggacgtatggccctaacgttttcagttgcatgccgagggcagtgtacaccaattaagcaaggaagacagctgtggaaaccagcgttgcaggacactggaaggctacaagcagagtcatcgttaagaagaacacccacctttctttctcttcacaatgaggcttttggccttggagaagctaaattttgttcaaagcctaggagaacctgctgtttatgaacattcctgtaaaaggaagtgcacaggtggttcctgttagttccattggcactgtgatgtaatctctgacattatcacagacagctgtgtgcctcacagggcaccaaggggccagagaaaactacacctcagtatattgtctcttttccagcaaatgtggctgcccgcttccagggcagttcagcaaccttggctgataaaataggaacctgagcctcatctacagtggatctgggaatgttctcttcctatcaatttgtgtaccacttaaaaatgcttacagctggctttggaggaagagcggttaaaatcaaacgtactcactctgagacattcaaatatccaggatatagccactgagcaactgcaaatttgctacagcaaattagggctcaggtggattcactgaactggagctcattaaagccacaggcagtttagaagccactcagacagaaatgagagctgaaaccaagacaatgggcaaacgcacaattggggcggtgggggtgagtaagtgggaaaaggactgaagacactcccacaattaaaggacaggagcgtaaagaaaaacagtggcagaaaccaagaagaaaccagaaatggaggaactaagctccccatctccagtcatcaaatcttctcccttacactgttcggatctgtgttactcctcagttcaacccctcgctattgcctgcttgttctgtgtcggtgacctcctcccaacctgacccccacaacaacaacatagtgaattaactgaactccatatatgattatgacatgactggaaagttctatagcctgtgtctcaacctgaggtacggtgtgtggataggggtaggcattaaaaaaagatacctttttctggtgtgtcagttgcgcacagtggaaagtaacttttaatcttttacatgaaacataaaatttcataacaatgtcatgcctgcagtgggctacttttcaatgtgacccagtcttctcctgggaagaggtgcacgttggtggagtaacttaaggcactggccaaaataggtgaaacttgtgcttatccaaattatgtgaaggagccaaagaaagaaagattaaagatccataaaggggaggaaatttccaatatgaattcaaatcctacagttcttacacactggtctctgatgtataggagaatgggtaacctgggtttgaatcctggctctaccagttcctagttatatgaccccaaaggcaaattacctaacttctccctgactccatttttctacttgtaaatgtaaatggaatactcaaagagctgaattaagcatggacatctagggagggtttgcataacacagcacctggcatactgtaaagaaccaagaaatgaccgctcttaatctgtaaacaccaagttcataccactctattaaaacattccaaagcttttgttttttgtgagacagagtctcactcttccactcaggctggagtgcagtggcgcaatctcagctcactgcagcctctgcctcctgggttcaagctattctcctgcctcagcctcccaagtagctgggattacaggcgcccgccaccacgcccagctaatttttgtatttttagtagagacgaggtttctccatgttggccaggctggtctcaaactcctgacctcaagtgattcacccacctcggcctcccaaaatgctgggattacaggggtgagccgtcacgcccagcccccaaagctttttttccatccaaaattgttattagacaggaaaatgtctattttgataagcagacttgccatatcatacacagcctgtcccaaaggatacttttagctccatatgcaaaaataagactaaatttaaatacccagtttcagacccatctggaaattagaagcacccaggataacagaagccaagtcaaaatcactttagttatcatttattaagtgtaagacactgaactgaaaacaactgaaatcatttattaagtgtaagacactgaactgaaaacaactgaacagatcttggtggtgagattaatagttggtatgaacaccaatgattaagtaaagtactttactgaggataccactctgaaatgcacatgaaaggaagcacacaggaaaaaccagtgtcaccaagatccctgctgatcaaggacagctgttaactggttcccaggaggggtacacaaatgtacacagacatttatataatcttctgttgtctaggcaccaagtcttgtgtattcagtaatcactcaaatcatgagaaggaattcagggagggagcagcagcttaaaaacaggtctggcctgaagcaggaggacctgtttcaagtcacaggcagcattagcaggaagaagccagtgaagtctgcagctgaagactgaagaaagttgccttcccttcctttctcctctcaccctaattccaataggacctcttcagtctcatctgactgccccctctacataataggtttcactgactgcttccattttttccgaagaaaactttatcttattgtctatcagacatttctcaaaattatgaattttaaagtggggggaatattggagtaaatagaacttttgtttgcattccacccatggaatgattgtaacaaatcaatgtaacaagaacagaggtcaacttttcacttactctattatgaaccttgaaggcaaggatgctttatacatttttgaatctgatctcagaatacaatataagatacataaaaggataatgacatgcaatgaatacatcattctaaagacaagaacaagtgttttaatttttttattcccatttaacagccccaagatgtctcagccattatttttttatttcaagtgaattaagctactttcagaatagaacaaaatgacttttctattaatagtttcctttagatttgcttctaaaaaccagacaatttagcttggtgtttccaacaaaaatgctgtagagaccaatttaatttacacaacctgaacagtcctgttctaagggactaatctaagagaccagctcataatattgaaaactgatgttaaaaacaaaaacaaaaaagaatcaggcatttaacctaccttttctttttttgagatgaagtttcgctcttgttgcccaggctggagtgcaatggcgcaatcttggctcactgcaacctccacctcctgggttaaaatgattctcctgcctcagcctccccagtaactgggattacaggcaacacgccaccacacccagctaattttgtatttttagtagagacggggtttctctgtgttggtcaggctggtctccaactcccggcctaagatgatccgtccacctcggcctcccaaagtgctaggattacaggtgtgagccactgtgcccagccaacctaccttttctgtactaactagatctcaaagagttgatgaggggaagtttctcttcataaaaatattctaataactaaaacaggaaaacaataaaaatatcaccattttgcaaacccttgataaaataatggatctaggcaatggttatcaatggtcatgaacactacaaaaagtgagacaaccaatattacctgactggggtgagaagtacaggccaccacctacgaagtagttttgccaaaaaaaatagaaactgaatcaaatcaagatctgattactatttacaggcattaaaagaacaaaagaacatgttaaaccattcattaaacaaaaagcattacaacaggtggtagcctgtttttttttttatttaattatgataaccaaacaagtactttttgataaatgaacataactttcttcatgttctctttgtgattatcttcatcttaaaagatgaggaaagtctatcaagtacaagcatgtttatggatgtgcttatttattgtgtaagacaacaaaatgtacaactttgtacaggtcaggagttgcctatctcaaaaatattttctttcgcccgggatggtggctcatgcctgtaatcccagtactttgggaggccgaggtgggcggatcacaaggtcaggagttcgagaccattttgcctaacacagtgaaacctcgtctctactaaaaatacagaaaaaattagccaggcatggtggtggtcgcctgtggtcccagctactcaggaggctgaggcaggagaatggcgtgaacccgggaggcagagcttgcagtgagccgagatcacgccactgtactccagcctgggcaacagagcgagactccacctcaaaaaaaaataataataaaaaataaaaaaataaaaatttctttcctagcgttactaaacttcctttcacttggaaaactacagcacagctgagccaagaagtaactggtccctgcttctaaaatgacagctttaggagtaataagcaaagaagaagctggatgcagttgagcaacctcagaggagacagatcactgtgaggagcccactttcaactgaactggcaccagctgttctcaaagtgctccaagacaccctgggggtcctcaggcacctttcaggacgtccatgacatcaaaattatcattataataatgcaaacaggtcattcacaactttcataggctgacaggaagcactgatgatcaaagcaagggtgtataaaattgctggccccttagcacaaatcaagacagtggcaccaccagtataggtcctcatgaccactgcgaactcacagtgggaaaaaaaaaggacggtttcatataaaaatatccttgatgaaacagtgaacattagcaattgcatgaaatctcaacccctgagtatgtgcccttttgacctttttaatattctttgtgctgaaataggaaagttcacatgaaggagctgtgcggcatactgaagtatggaggttgcctgaaggaaaagaatttatgccaaccgtttgatcaacaagctgaactagcagtttttgtttatagaatatcatttttacatgaaataaaaactaaaagtattagtatttaaagttgggtatttggcacacactttctcaaacgcaaaattagcctgttgcttcaaaaaaaaataataactgacctatttgttgccaatgataaaagtcaagccttcaaacaaaaattagatacttggaaaaattgtatctgccaccaagagtgtgacagctttcccaatatgcagacggttaataagacggtattgtgtccttaaaaatttgtagagggtagatctcatgttaagtgtttttaatacacaaaataaaaataaaacacaaagacacaaggaaactttggaggtgatggacacgtttatcacctggattgtggagatggtaaatgtaatataaagtttatttgcaatgtggaatatggagccatatgagtgaatgtttctcactttgtggtatttaaatccattggtctttctttcattttggatctttcttattcatgcatgatttggaaaatactggctcatggaaataaatgttagcacattttataatgccaaatacaggagtgtatacatttgtccaaactcaacaaattctatacattgattatatgcaggtttttgtataccaattatatctcaataaagctggaggggaagaagacttttcaagagatgaccgctgatttcaacaaatgtaatttttttctaatggtattataaaatgtgctaacatttaattccatgaatcagtatttcccaaatgatacatgagtaagaaagatccaaaatgaaagacaggtcaatggattttaatgcaacaaagtaagaaaagtttactgatatggtttcagattccacaccgcaaataagctttaagaaatggccacttgcagagtttgatgtagcatcaaagggaatatccacaattatcagaaaagactattaaaacacgcctccatttccaactacagatgtgcctgaggttggattttcttcacatattccaaccaaacaacaaatcacaacagattgaatgcagaagcagttatgagaatccagctgcttctacgaaaccagacgttatagagaaccgcaaaaatgtaaaccaccaccactctttccctaaactatctttgtaaaggtatttttcatacagaagtattatttatgttcatatacaaaagggttattatgttttgatttttagtttttatgagacagggtttcgctctgtcactcaggctggagtgcagtggtgtgatcatggtacactgcagcctcaacctcctgggctcaagcaatcctcctgcctcagcctcccaagtagctaggaccacaagtgcacactaccatatcctgttaattttttaaattttttgtagagacaaagtctcactatgttgcccaggcttgtctcgaactcctggcctcaagtgatcgtcccacctcggcctcccaaagtgctgggattgcaggaatgagccaccacacccagccaggttattatgttttattgaattcataaatactctaaaatttcccacttatatttctaatatggtaaacattgatagatataactcatgtaaagcaaaggtctttgaggtccttaataattgttaagagcgtgaagcggtactgaaacaagtctgaaaactgcagctccaaggatatggagctgaggtcaaggctgtgcttgttcaagtgagccttcaggaattaccttattctttgagttcctgtttgaacaaacgctaaaagttggaagctcagcagagcccaatgtctggcctagagcaccaagaaccaccagccacagccatcctgagaaagggccttatgagcagaatattttgtattaggctcgggtgtgaggttagaagacctcgggtgggggaagtcagcagcactttttccttcttagctcagcacatacctctttcttgagattctggtctcaaaaatagctaaccaggccaggcatggtggctcacacctgtaatcccagcactttgggaggccgaggtgggcggatcatttgaggtcaggagttcgagaccagcctggccaaaatggtgaaacctcgtctctactgaaaatacaaaaaattagccaggtgtggtgacacacacttgtagtctcagctactcaggaggctgaggcaggagactcgcttgaacccaggaggcggaggttgcagtgagccaagaccatgccactgtactccagcctgggcaacagagccagactccatctcaaaaaaaaaaaaaagctaaccatatcagtccagactagcagactagtggattaaggaagctgagatgaactgtttcccgtgcgcttcctcctctggttaactcaagaaatatcaaaacagccatcccaaccaacagaaatctctgcctttttaacagactggtaaattcttcaggaccagacttaacacaaaagtcacttaaatcttaagaactggggcaagaagtgcagtctcagctctccaatatttttttgcgtgtttaagagatgtgtggccaagagctcacaaatacagtgtctaaggtgagtgggccactatggagactttgcccttgaatctgcgtgaaacggcaaggttctgagcaaatgagtgacaggatccacccgaacccactctgggctttgggtggagaaatggagaaaaggttttaggggcaggggcaagagcagagaagtcactacagtaagccacatgacagataatgatttacttcttcccaaaaaggccgaaacattgattttatttttttcctctttgagacagagtctcatgctgtcacccaggctggagtacagtggtataatctcggctcactgcaacctccgcctccctggctcaagcaatgctcccatcttagccacccaagtagctgggaccataggcatgtgccaccacgtccagctaatttttgtattttttgtagagatggggtttcactatgttgcccaggttggtctcaaactcctgagttcaggccatccatctgcctcgacctcccaaggtgttgggattacaggcgtgtgccactgagcccagccaaaccattgatttctaatgctattacgctactattgatacatacagtacataaagatcttctattagtttctcttggagcaataacaaaataaaagtatgccttgtattgatgccctatatcctttactaagtggccccactcacgaattacagtctttttactttcctttttttttttttttttttaacatagagagtatttccagcatatactaaactggaggaaagagtataatactacaaggaaacttcttgaacttcttacctaccttcaatttatggccagtcttactttatctgcaactgccccacctccccatcccagcttattataaagtcatttttaatcagattttgttttgttttgttgagataagagattcgcttttgttgcgcaggctggagtgcaatggcacaatctcgactcactgaaacctctgcctcccaggttcaagcgattctcctgtctcggcctcccgagtagctgggattacaggcgcatgccaccacaaccagttaacttttgtatttttagtacagatggggtttcatcacattggtcagactggtctcgaacgcctgacctcaggtgatccacccacctcagcctcccaaagtgctgggattacaggcatgagccaccacgcccggccccaatcagttttcttattaaacaaaaaggattttaggaaaacagactaacacgtgaaagaagtaactcacctagaatcttaatgcccattactgatatgaattgaactgtttttatttgaacattcacactcatacagatatgaattaacagtacatggacaatatagagttgtacatgaaaattaacttattctcttgttacaaaattaggattatcctgatgacacgattttgtaaacttttgccaccatatattaacaatgtccatggagaagaagaataaatgcctactgctgcacagtttaggatgtttctagtatttcaggatattagaatattatcatgaacagctacatatataaatttagtgaacatctactaacatgtactagcaaatgccaaacatgcaataatgtaaagaaaaatggactcccaggtaacgcaaaatacagcaactgctataaccactgatgctggcaagaccaggaaaagtagctcctttggataggatgacagctagaaacattaactagggattaagactgatattggcagggtacggtggctcacgcctgtaatcccagcactttgggaggctgaggcgggtggatcacttgaggccaggagattaagaccagcctggacaacatggcaaacgccgtctatactaaaaatagaaaaattagccaggtgtggtagcacatgcctgtaatcccagctgcctgggagtctgaggcacgagaatcccttgaacccagtggggcagaggttgcagtgagccaaagatcgcaccactgcactccagcctgggcgacagagacagagagagacactgtctcaaaaaaaaaaattaaataaagacagtaatactgatgatcctgaccctgtgtaggcctaggctaaagtgtgtgtttgtgtcttagttttacattttaaaaaatttttttaataaaagaaaatatatttgtacactataaaatgtgcttgtgtttgaagctgtgttattacaaaagagtcaaaagttaaaaaccatttataagtttatcaggcaaaaaagttaagctaagctttgtttattactgaagaaaaaacactttttaaatgaacatagtgtagcctagacatagtgcttataacgtctacagtagtgagtgtacagtcatgccctaggccttcacattcactcaccacccactcactgactcacccagagcaacttccagtccagacacatgtaacgtgtcccatgcaggtggaccatgtttaatcttttttaccatatttttactatactttttctatgtttacagatgtttagatatacaaataccattatgttccagttgcctacagtattcaggacagtaacctgctgcacaggtttgtagcctaggagcaacgggctataccatataacctaggtgtgtagtaggctgtgttatctacatttgtgtaagtgcagtctgcgatgttcacacaatgacgaaatcacctaatgacacatttctcagaacatatccctgttaagtgatgcatagttgtcgatatatgtaggattcccctacaccaggggaaataaacaatagaaaatacaacagaagaaaaaatggcattcacagtagaaacagaagctgaactagggtctcttactgtaacaaagaagacaagatcattacggaaaaaaaaaaaaaatctgacctccattgaataaaacattaataccactgataagtggtttccactcgggatatagatcagtgtcaccagaggagattttaaaaaatacaattgctagactccactctctagagattataattcagttcatctgtggtcaatgggacatatttttttaaaagctacctagcaaattctaatataaagccatggttgaaaactaccagtttaaatatgtttttaaaataacacaggagggagtcattcttctagatatcaaaatatataaacaagttgtagcaataaaaataaaagcaaaatccactgtgaaattagaacagaaacagacaaattgatcagaacagagcagggagcctaaaaaggtgagagagagagaatgtgtgtgtctgtgtctctgtgtgcatatatacgagtgtgtggatcttgacatatgatacaggtagcatcacaaaccactaggttatttagtaaatgagatttgggaaaattcgtttgccatagaagaaaatacagaaacataactttgttaactaggaatggagaaatatttcctacacaagacccagaaggttaaaaaaaaaaaaaaaaggttggatcataacaaaattaaagattccgtttaatgaaagatttcaaagaaaaaatctgacaggtgaaaaacaaaagatgcgtataccatttaaaatccaacgagagactgaaaaaagaagaaaactgctataaattagggcagaaaaatgggaaacagatatgaaaagctaacagaaaaagaggcaaaggatatataaatggcgaactcaaccgaggaaaaacacacacagtatacgataggatattccactgcattagtaatcagatagctgcaaataagaacaataacatatcactttgtgctggattgctccatctgttgcatcagattggaaaaaattataaggtcagaaaatgccacatgccagcaagaatgcagggagcaacagctggtgaaagtgtcaatgagataacaatctggtcgtacttaagggaattatgcatatgccagagagagggtcccctgggggcaaggaagaacatgaatggggataggtgatgaaggggaaagatacaataaaataaggtgggagactctacacggaccaatcatgacagtgtgccatgaagtgagtgctaactccagtccgagcccctgagctggggagggagcggagcggggcagctccgcgtcacaggtcccttcacccaaccagcaggtattcagtctctacataccaggaactgcatcccatcctagcgaccgagtagcaaaagatcaagcccttaccctcatagggtttatgtcctagtgaaggaaacaataaaaaggaaacaaataagataatgataagagagtgttaacagctaacaagtaagacagtgatagtgacagaaagtgatggaaagagggtttcactaatgaaaggatagccagaggtgagatcccgcaggtctgcagaaagaaaatgaaccaggcattcagcaagccgagagatgagatcccaaagaattgcgttcaagggctgggcgtggtggctcacgcctgtaataccagcactttgggaggccgaggcgggcggatcatgagatcaggagatccagacaatcctggctaacacagtgaaaccctgtctctactaaaaatacaaaaaaattagccgggtgcctgtagtccagtttaaatatgttttaaactggaggctgaggcaggagaatggcgtgaagccgggaggtggaacctgcagtgagctgagatcacaccactgcactccagcctgggggacagagcaagactccgtctcgagaagaactgcgttcaaggtcatcaaatacaaagttgtcatagtacaggcgacagtgtgttctaaagatgactttcaggtacttcctgtcattcagctcccagaagcaaccttcaaaatacctgttatataaaatgtaaactataagggttattgtgagagtccaacatacggtgattaaagaatgcaaactttttgaaggggaagagggaggaggcagcatcgatatgaatgtgctatgcctctaaaaaatgtttctggaaaattactaggatccacaaacttttccttcactccttaaaaagtaattgagtaatcatattttttccccagcacagtgccaggaaatgaggttaagtattaaattttctgtctttgcttcaattgtataagatgcaggatcctatttattttatatacgtactgtttttatggataaaagaaaacatttattgcatgcttgcaatctgcaaggccctgttccctgagcttctacacattggagcccacttacattcacaacaaaatactatattatttccactttagagacggaacaacagaggttaagaaacttgcctaaagtcaaagtactagaaagcagcagagcagagattcaaacccaggtctttcaaagtgttaaccactacacttacgtttccccctagagtggctggcccctgcagtggctgtagcacatggccttagaacttattagaaatgcaaatcgccaggacctcccctcccagaccgactgatcagaaattctggggctggaaggcagctgcctaaggtttcacaagccctccgtgtgatcccaaggtatgctaaagtttgagaaccactggtagaaatttttcatactaagcataatgtgaaaggtgaaattactaccattttgaaacttctaaaatataaaatttgtatcctatttaaaatgactatgaagaaacgaaaacagtgttagttcatttcctcactgctcaacttctttctcccaaacttgacaaaatgcctaatctctatcctgattatactatgtacaaaaagggtactctgatgagcgttagagcacagaggtctgaactcactcttcagaagtaatcagaagccataataggaagagaaaaaaacaatattttgaatatcagcagaagcttgataaatcttgggccataactccaaattttgatcccaggctcaactccaaatttttacaacatgacttcaacagtcttcccaatgccaaaaaaagaagttacaaccccgagaaatatttgattaacaagattcaaactgctttaagtgcacatacagagaaactgtccaagagtgtgtttttatcaggagtgaagctaaggaatgcctaattacacatcagaccctctgacaatattcacagcaaaaggggttaacgttatccctgtccctgcacacacctgccgtgtacggcatcctacctgatccttctcttttcaaagctatatctagaccgggagacttttctccccaactcaagtactcaatttgagcagtacagctctatgtgtattcaagtttgcctatttctaataaggcctttttttgttgttaaagggatggaagaaagagtatgagaaataagtatattcaagcacctaccataatctgaaatcttccataagccaaataactctctgaagctattcactcgcatactcaagtcattaattttataaatttcaggtttctacttattccaaaaatttaaaacataaaattgaagattaaggagtacttagtccaagcttggaccacaggagagctataaacctgtcttaaaatgcttaatgacctgattaaggtcatcaaaggtaaagaaaactctaggaagcagccttttaatctgcctggctacttacaaccacccaccttttccatgcccacgctctcctaagggctgaaggcactgccaagaatgaccttcctagaagggctgaatcctatttattttctctctcccaaatctccaccaaatcccctaagaactggcagtgttctggtaagaaacaatttactattgctctcctccccacccacagttcagtgcaactgaagtgaacacacacacaccccaaccactgaaagactttctcacttagattcctatcctgcattttcaaagtccaaagttgtcttcaaaatatcttgcaaaatgcagtcgtaccagctagtctttaatctccactaacattgccagttctatacccaaaatggatatcgcaactgctatgtattttcatctcccttctctaacaatcagtaacaagcaacccaatcagtaataaacaagcctgacaaatagctcctaaattcacagagaaaagaatggtctcctctctttcataagtaaagcaagctgataatgttctagtaaatagaaagactaaatgcctcttcaagaaaaaaacatttatatgcctggaaaaaacatcttgggtttttttgtttttgtttttttacttaagtatctgttcatagtaggtagcaaataatctttccacacatatgcactttaccagttcttttaaagactcagtaatctaagaaagcaaagcataagactatgctgaaagagctaagccgcagtttacataaaatttaaacaaaacacaagacattaaaaaaattcaactactcataaataaagaccaataaatctacactttggtctgggtttctgaacacaggaagaatcagagggttcaataggagaggttatttctgaaatcgtaggcataccttgaagatatcacatgttccattccagaccaccttagtaaaactaacactgcaataaggtaacagaaatgtttctgctttccaagtgcatatagaagttatatttacagtatactgtagtctattatgttggcaatagcattagctcttaattttaaaatgctttataatttttttaaaatgctagtgatcatccgagccttcagggagtcataatctttttgctggtggaggattttgccttgatgttgatggctgctgactgaacaaggtgctggctgctgaaagatggatggctgtggcaatttcttaaaataagaaaacaataaggccgggcgctgtggctcacgcctgtaatcctaacactttgggaggctgaggtgggtggactgcgtgagctcaggagttcaagaccagcctggtcaacagagtgaaaccccatctctactaaaatataaaaaattagccagctgtggcagtgtgcacctgtaatcccagctactcaggaggctgagacaggagaatctcttaaacctgggaggcggaggttgcagtgagccaagatcgtgccattgcactccagcctgggcaacagagcgagactccgtctcaaaaaaataaaaaaaatgaagtttgccacatcaactcactctgcctttcagaaaagatctctcttttggtagcatttcacccacagtagaacctcattcacaattgaagtcaatcctatcataccctgccactgctttattaaccaagtttacagaatattgtaaatcgttcattgtcatttcaacaatgctcacagcatcttcaccaagaatagactctctctcaagaagccactttctttgctcattcagaagaagcaactcttcatccattcgagtttgataataagattgcagcaattcagtcatattttcagggtctacttctaattctagttctcagtatactatttccaccacatctgcaggtacttcttccactgaagtcttgaacccctcaaagtcatccatgagagctggaatcaacttcttctaaattcctgttaatggtgacattttgacctcctcctttgaatcacaaatgcccttaatggcatctagaattgtgaatcctttccaggttttcaatttacttagccaagatccatcagaacaatcactatctatggcagctatagctttacaagatgtgcttcttaaataataactcttgaaagttgaaatgactcctagatccatgggtacagagtggatgttgtgttagcaggtatgaaaacattaatttccttgtacatctccatcagagctcttgggtgaccaggtgcattgtcaatgagcagcacttgttcaatggtaccctttcttctgagcagtgggtctcgacagtgagcttaacagattcagtaaaccacgccataaacagatgtactgtcatccaggctttgtcgctccatttatagagcacaggcagagtagattttgcatgacgcttaacaatttttggaatggtagatgagcagtggcttcaacttaaagtcaccagctgcactagctccaaacaaaagagtcagcctggcctttgaggtgaagcactgacttccttctagctaagaaagtccgagacggcatcttcttccaatataaggctgtttcatctacactgaaaatctgttgttcagtgtagccaccttcatcagtgatcttagctagatattctggataacatgctacagcttctatatcagcatttgctgcttcaccttgcacttttacattagggaagcagcttctttccttaaacctcatgaaccaacctcttctagcttccaacttttcttctgtaacttccttacctctctcagccttcatcgaattgaagagagggttttgctctgctggcttaagggaatgttgtggctggtctgatcttctatccagaccactaaaaccttctctatattagcaataaggctgtttcactttcttatcatttggacgttcagcagagtagcacttttagtttctttcaagaacctttcctttgcattcagagctcgcttgtttggtgcaagaggcctagcttttggcctgtttcagcttttgtcatgacctcctcactaagctcactcatttgtagctttttgatttaaagtgggagacacgcgactctccattcacttgaatacttagatgccaatgtagagttattaattggcctaatttcaatattgttgtgtctcagggaatagggaggcctggggagaggaagagagttggggaatggccagttggtggagatatcagaacatatgtaacatttatcagttaagttcaccatattatataggtgcagttcatggagccccaaaacaattagaatcgtaacatcaaagatcactgaccagagatcaccataacagacagaataacaatgaaaagtttgcaatattgtgagaattaccaaaatatgacagagacacacaaaatgaacatacactattggaaaaatagcaccaatcgacttgcagggttgccaacgaaccttcagtttgtaaaaaacacagtatcttcagagagcaagcctgactaacaatttccttcactttaaattcaaaatgaaggaataccctttccttccgaatgtatctcatttaacaaaattcaagactttttttttttttttttgagacggagtctcgctctgtggcccaggctggagtgcagtggcacgatctcagcttactgcaagctctgcctcttgggttcaggccaattctcctgcctcagcctcccgagtagctgggattacaggcgcccaccaccacgcccggctaattttttctattttttagtagagacagggtttcaccgtgttagccaggatggtctcaatctcctgaccttgtgatccgcccgcctcggcctcccaaagtgctgggattacaggcgtgagccaccatgcctggccaaaactcaagacttaagtcattcattacaattttgtctgaattgcaattaggagagaaacagctgcagtacctttgtatctttgtcagtgaaatgtttataacaaggaaaaacaaaaatctgtttgaaatctccagtaagcgccccccagtgcaccatctagtggaagtcaggtagtgtcataattaatttaaagaaaaaagtcacagaaactctgaaaaccattgggggagggggagaagtcaaagcttcaggtaagaatacaagcaaatactttacaaacagccaaaatatctttccagtgtcccacaatgcaagagggctgggcttatgagaataaatgattcattttctgtataatcaacagatgataaaagttcctttatggaaatttttgcttgggtgctagaaattttgacaggagagtaaaagttaaataaagccactaaaacataaataagtaaataaatgctgggctagagtgacagccttgtgtaagaagagttgccttatatgttacatgaatatgttaaaatgtacatgtgaaacagaggtattagccacaaaacaagagataacttcatgattagaacagttacattcaggctgggtgcaatggctcacgcctgtaatcccagcactttgggaggccaaggcaggcagatcacttgaggtcaggagttcgagaccagcctggccaacatagtgaaaccccatctctacaaaaatattaaaaaaaaaaaaatagctgggcgtggtggcatgcgcctgtagtcccagctactcaagaggctgaggcaggagaatcacttgaaccagggaggcagagatcacagtgagccacagcactccagcctggacaacagagtgagactccacctcagaaaaaaaaaaaaaaagagttccattcagtaatccataagacattttcatgttcctgataactagtaaatttaacaaaacctaacgattctctagaattccctaagccttaacatcatacaagcggctactcccaactacccatttcagcctgtcccacactaatgcccaaactcctttggtcaagttattctaattaagaaattattcttcaatccgtctataaatttacagtaaacacttcccgaaacaaagtcataagtcatgatcaaaatgcattacacttcattagtattttccttctgcatatcaattatttctattcaattcaaaaaaaggtaccgaaattcaatgctgagctagagatgcaaacacaaataaggttctctaatttggaaagcttcccaaaatttaaaatagagattttcacacagcattcctaacttttgtttgttttgcctgtgtggaaaattacctttcacctgaaattcaaactagctaagcaacctgaatggaaagaaaaacctcgcagataatatttctttacttgaaaataaccatctccacctctgacctgtgtatacgggatcaaattggtatgcagaagttggcttgatggcgggaatcttacccagattttggattaaatccattataggtataaaataaagtaggagtaaagtggggcaggattcctttcatttctagggctttcagttgacatacctgtaaaatggacatgctatgcacagcctgcctcagaagagtaggaggatggcatactatataattgatagagtgctatgagcttcacgattaaatggaaatactgtttttatagaaccagagtgaacctgagcatagaaaactctccaagggccatcgctgtgacattaccgctaaaactcagtgaccttcatcaattcacttgtaaacaagcaatatattgagcaagtcaaaggaaaggcagcaacaattcaagatacttctttataagtaaatcaaattacgtaattaatagcccaggatttacctgcaaactattactgcctgactagcaggtgcatccccaaagcctcgagtacagagactgtttttagagagcccccccttttttaaatgtgaatattgcttttaaaaattagaaaaagaaaaaaatcacaattctactcccacccatggcacagtgacagaaacaaggtcccacccccacaatcctttcaaacctgcacaggcattcctcacgaacactcctccccctcattcctacctcaccgctccccacttcagcccagacaaagctgagttactcggctgggtctacctgtcacttaagaaaaagcccccaaatagattcacgctaaatgctgcttttaattttttaaatagcaaataagtaaataaataatgctatcgtgtagattacacggccaaacgcctgttctcagaaaacatgtaattaacacgacccaagtgaagacgcctttctggcttagggaaagaaaaaaaagaagccagccagcttatcgctccctttcagtcggttcttttccccggggagccggactctgactcaactccgcagtttttcctccacctgtcggttctccccgctctgggtctgccccgccgccgcccccgcccggagtcccgcgcgtcaacaggggtctccaggggtcctcagggtcccgcccgaggcggccccgcccctgccccggccccgcccccacctcctcacaaggtgcccgccgcgggctcccaggctgaggcgcctagaggccggcaggaggctccggaggaccgcggcaccgctcggcccggtcgccggcgcagggagcagcttcgggggccgaccccaccgcccgagcctagccctgggctccgacaggcgctccccagaggcgccccattacctgctctgggctgccgcggtccgcgggcaggaggcgcactcgctctggcccctgcagccccgggcccggaggcaaggaggcagcgaccgccaccgccgcagaggacaatcgggagccagcgggctcggcaccgccgcggcgggcgcagaacgcacgagcccagtgggagcccggcccccgcctccagcccggctagtaaccaacacggcccccaccctcggaggggcgggaccgcggttggaggggcggggcggggctgcaccgcccgcgggtaagaggggcctgctgataggctgcgaaggcgataggcgtctcagacttgaagacgcctctccagcagaactccctcattggtcggcaagagaaaacaaagctgggctctgattggtgacagctctgtagctcctcctcatacccgcagtccccgcaagttccacccctgcccgcccggttcgctcgcccttggttcccactcccaggtggctgcagactggagtgtgtttcatggacgagcaacctccctgaggagaaccccggatacgcaggttcattcgccagatgcgagttttcttaagccgctgcgattctctgatttcagtatgaacttggtgaataacgtaatctttaacttcctttggattcagacaagtctcctaggtttaaaaatgctgcataagattgagagggatattgttatgcacgaaaaaagacataaggtgttttcacctttggcgacactgtaggtgactttttcttattacctttttgtgttccatattgaacatgtactacatgattagaaaaaaaaattcttaaatagaaaaatgagtagggtgcggagaatggtaaagacaaactttaaggaaatccagagaactgattctttcacaatagaagaaaatacagtaaacatgcttaatatctgagggctaccccgaaaaaacatgaactggtatcagcgcccttcagctctcttaaagaactttacatatgtgaccgaggtgcccccatactccttcctatcatgtaaccaacacataatgtggacagcactacactgcaaacagaattacaggaagactcttataggaagaattagaatccaaagtacacaatcaataaagctttagaaaaaggggtagtaaaaagcagaagacaaaaaaaaatcaggtaatataaattggaaagctcagctgatggagggaatcatcagaaaaaaaataatgtgacaacacttcaagatgtgatagagactttgaatggaaagctgaagggagaggaaggggattgagataaggatcaatgacctgcagttaatatgagctctcagaacacatcccccagaactggtgtcagcctagaaggcaagaagcatttctcacctagggaccactctcacttaactctctctagctgccttaacattctgtttgttcttgtcattctcgcaaagttctaaaacaggctatttgaaattaagcacttccccccagcaactccgtgaattacgtaatagtgaaaaatggagatagacaaaaagcaaacctgaggaaggaaaggaatgttaaggtaaacataaacttaaagagaagtaagggcaaaacacctgatagaaagaagacaagaaattcttttttctctcttacttcctgagaataaagtaaaggtctttggaggacagaataaccttattgcctaacaaaaag

SEQ ID NO: 380 - DNA, 69200 bp, Homo sapiens
  source 1..69200: mol_type = genomic DNA
gtgttctgagagcgagagagcagcttagccggcaaatccttaaatccttcagagattacaggattgtgcaagagggaaggccaagagggggacctctgaggcagctccagcatggcctgttgtgtgcagaggactgagatcccagaacatgccacaccaagaagacatgtcccaaggggcagtggagccacagccaccagaagggacctggccctgtcggacctgctgaagctagccgtggagtgcaggggctttgttggtctggctgctaaccaaagggtggctaatgggaccctttccaggggcctctaggggatttcagtgggggcttgcttcgaggctctattaccactggactgtttaccaagagcctcagcctgacagagatgggaagagacgagtgagcatttctgacccaacacccccactgcagagttggggaaacatttacccaagataggaggaataaaaaggaaaaaaattgaatttatttccaaaaaacataccaaggtggacaagataggaaacaatacaatttatattacagttttattattatttaaaaattttatattaacaaaatgagatgggatctgcctatgttgcccaggctggtcttcaactcctgggctcaatctcctcggcctccgaaagtgtgattacaggcgtgagccaccgcacccggcccatattacagtttcatagtgtttttgattactcgtggtaggagaaatgtgtcttctttgcacttggggtctcaacgtctcagtcctgccctatgccccgagaccccaagaggctttcccaaggtcaggcagggaatccgcagagaggcagggctggactccagcatcctgactccccagttcgtgctctgtgctgcagagacctgttgcgtaacactgagtaactgtggattgtctaaccttttatgaaatttccagctggtcttttgctaccggccagcagtccagttggtgggagtgatgatgccggtcttctgagacgtccagtggacagattttccccaggtttctggatgcagccccaacaagcaaaagtgctacactcctgcaccgggaacactgacacaggggtcacgaaaatgctaaaacaagacgtgcaagaattgttgcgctccgcacacgtaacaagggctctgcctccccctcccccaatcttcgccctggtggccaggccctgggctccgccccttccccaccagaccgggggaggggtcctcctcggcatggaggtaggggatgctaggctgctggagacgcccgcagaaagaggcgggatggcggggcggatgctggcggcccgggtctggccacctgggtcagctgcacgcccccgccccgggctggccggacctcgtagcccaggtcccaccacgccgtgaagtttgcggaaagttttgcagttgcttccccgcccgcgccagcgggggagttgtgacgcagcgtctggggatcctggccgggacagaagagagggaaggcgaggcggggagagactgggaaacagagcagcaagagaaagggcgcacgctggggtcctcctggacccggcgtgtcctcctctccgccacccctttctctccctcccgacgctctagccccagacccgcgcctcctccccttcccctcccacgctgcccacttcccttcccctctacccctcgaaccctcctccccggttctgcgctcctccctccgccctccctccgcccgggctgcctcctccctcctcctccccgggaggcatcacttcgtcccgacccggaggaggacgcgagccccttgcgggcggtcatcacagcccagcctcggggctgccacagcgcgttgcgcctgtgcgccctcggtccccgcgtccactgagcgccgcgctcggggatggggcccggccggccggcccccgcgccctggcctcgtcacctgctgcgctgcgtcctgctcctcgggtgcctgcacctcggccgtcccggcgcccctggggacgccgccctcccgggtaaggcgctgccaacttggccaacttcagggcccgggcggggggagcgccgaggcgcgggccgctctcgacttttccctccttttcccccctcttttctccagaagcgtgtgtgcgtgtgtgtgtgactgggtttttaaaactcgtctccgcttttctgaaagcgggggaggagaggggaggaggagcgcgcctagaggtgggggaggacctgagtggaaccagatgtggcgggcggcgggggaggggagcccgggggactccagcagcctaggaggaagcgggtgggctcttgaggacccccgcgcaccgcgctcccggaccacccggcgccggcccgtcctcggcaggggacctgcagggcgcgcccggggagccagggctctctgtccgggagttcccgggcccagtctcctcgctctgccccaggactgatgcgttaggacggctttccaactatccgcgagggttcgtttcccccaccttccccccgccccctgcatctcgtgggcgttgatattttcttttccacacttagtcttcaaggaggcttgtggcgcgcggcatccgccccgcgtgagctcggcagccctgtgaggaggctcctgccactgggacgcagcaacaggctgggcgccgccgtgctgtgatgttgcgtagcgtgggcagctctgggcacactagtggccctccagaggggacagaccttgagcggcaaaagagctgctaaagattttaaaacccaacgaacaggaaacaaaacaaaaatcagaaaaccccaaaactgtgccattctcttcctgctccttattcaggggtaacagtgaagtgtggggacagacagatccctcgccaagaatctaagagttgaaaggaaagatccacttcctgggggagtgggggtgggggtgtctggagtgaccgggggaatcgcccggcccagcttggtcctgctggctgtttaattgggggatggggacagtccgtgcagtgtctgcagttttgtgcaaggaccagacagccccctggagagtctggggcctccagcctggcccgtgcttgctgggttggcctggcgtgacgtaggcacaagacacatatctgccagatgggaaaggtgggggccacggtgacccacattcacaccaaccggagacccccggggcaattctgggcccacctggcattgaatgtgggacagacacaaaccaggccgggtaaccccctaacccactgcagggcggcctcacaggcagttcccctacctcctcgcactcctgccttcctctgctcctctgcgcagggcctcaggaggcaggcggtgggaaggggtggggaggatggccattcccagagctccagagcacactttaaagccaggccctgggagagagttgtggccagagtgctgactcggcctttccccctggagcttttcatagagggggctggaagtgcctggtgagaggcccggtcagggaggacaaggacgcctggagtgtccctcctcctcctggtctctgtgcctggccctccctggggctgtgtccagggatgaatagcctcagagggtccccttcccgttggcactgcattgaccacaccctgaggaggcttggatctgggtggcaggcagtgtgaggtcttccagcagcagctgagcaggaggaggatggagctgctgcaggttccttccctcggaaccgtgccctctgcacagagtgcgcttgcccctgccctgccaaattccactgggccctaccctgggaagcctgttcagagcctctgggccgaattccttgcccgaagagctggcagcccctagtacctggtgaattacgttgttgttgggaggaattcaccagcaccagagaccaaatagcccaggaaatgcatgtgggaggtagggtgtggcaggccagtgctgctgggggcgaggcttatgccaggcagggcaggggctgcgtgtgggcagtttcctgaccaccatgggggagccctgtgtgcccagagcacggggcaggggcagcgaggcggcagtgccttcttggtgcgtgatggtggaatccatcttttctccaccttggtggagtggcccgcggagactgtcactggaaggagtcctctttgttagttgccatattaccgcatttctggagcatgcagtttgctcagccttgagccaagttcttggggaggagggaaggtagagaagagtgtaagatgcatcctctggaaaaagaaaatcgtgtgggagaatgaaacgtggaacagtgaactgcgtagggggcagaatgccattggtgggatgcctgcctgcccagacccacgctcaacccttcatgtgcaagttcccatttcattttgataacaacccaaggagatggttattgttggaccatttttgcagttcaggaaatgaaggctaagaggggtctgatcatttacattggtcacacccctagtaagtgaaaggctggagtgtggatgcttcccgtctggagattggaggcaggagagaccgtatgggccaaagggtggccaaggctgtctggagagaggcaggaaggggccaccaggctgggctcttctggggatgatgtggaagcttgctggctgggccggggagaaggttgagtgaaagaggtgcctgggaggccagaatggggatgggacctgcaagctggctgtggggaaccccaggggacccttggaggtttccgagcagaggaatgaggggatagttgctgggaaaggggcttctgggagctccagggatcaagtctcaaggccatggggtgaggagacctcaggaaatcttcctgtggggaaggtcggtgctgcctaaaggacagggagggtggcatcgggtacttggggctctgaccagagtcagccagaccagctccctacacttctggcccagcttctgctgagtcgtggggttcggaaacttcttactgttcccccacgcaaaactcagttttccttgctccaaccctctggctctctgtgagtcatcagggcccaggaggtgcccagccgagctgtggctagtgctgggatcctggctctcttctgggttcacctgggcaaggtgagggtacatggaggggaggaagaaccccgggttttggcccccatttttcgcaccagagaaatcctggctttctgatgcacgtagggcaccgtgacttggctcaatgagatgatttcggaagtgccatgcagttctcaggcagatattcatttgagttcctcatcagtttaagcatcgaggaggagtcctgttgcactgtccatacccccagagggatggagcgatggcacccacggctgcgctgtgcatgtggtgggcgccgtgctgggtcctgtgctggcagtagctcttcggcacctcccatctctgagcaggtgtcagagatttgcacacacctggcgtgaaaatgttaaagatgttaagggagtcactcaaggctgtgccaccacaccactagaaggtgttaccagtgagattcgaacccaggagtggttacggagcctgaacgctccagtaccatacagcgtttccatcgcatgaagcactgtcagtgtgtgtgtgttaggaaagcctgggaaattctgccttatgtgttctccccgcccccataactccaagccctctaggacacctctcaatgtgtcccaccgggaggactcctgaggaggagggtggagcgagcagccctctgtcacatgtcagcggtctgggcgcttgggtcagccacttccttgtgggtccaggaggcctggaccgagccgcctgcagtgtcctcaggatctctgagggaccccctccaagaaggcattgataagtgagtgactcaaggtgccccagcatggcactccagcttccctgaggtcaaggattcacatggttgttcattcattcattcattccttcagtgggtgtctgctgagctcctgcagaactgaagtagagatggccatggcctattctttatttgagacctccccaccgtgtctccagtgggggtccctggacttggaaggcctgagcactgctgataggaagcgtgtcttcctgttcaggcctacgtgagatgggagggggccgctttcccacgcctgggtcctgtgaatctgggtggggtgggccagtggggtggtgacgcgctcctggagctcaccctgggccctgcagatctgtcactcttcagctaggggttgtaccagtaaacggcagctggatgagggctgtccagtggcacctgtgacaccggggtctgccggggtccaccagctgcagccctttaggaaacagattgggtcgaccccctcaactgcacactgtggcccctcgtggaattccaccggttgtttcccttcttgcacttccccctggcccctcgtctctccttccgccgctgggcaccagcctcttggctctgcactctcacagcgcagacccttccacctgcgctctgctcccctcagcctcccactcctcctgatttctctttctctgactgtgcattctgccctccgcagctctggtttttgttgtagaagaaggaccaacttcttcctagtttccccggccccccatgcctctggtctcttgtcctgccccagctttctccacctccaggcttctgcccacgcacgatcactttgcctggtgtgcctcccctcccctcttctttcccaccttccagtgacccttccttcgagactcaaggatcctggggaggacgctgagggagcctggtccctgcctcttgggctgacctggggtgacgagagacaagcacacagacatggcccatggtgacaaatcccagattggatgggtggcctctctgtttatctccttcccagggatcacctcaggagggcacatgtagggaacactatagccagccttcctcagccttccccagccttccctgaaggcagccgggtgcgaggctgagcagtggccccttcctcctgtagatgaggcaggagtgtgggcatggctggcagtgtttccccccgtcagtcctctggaaatgtaaatagggacagagtcggtgggaccaggattgatggcactcaccagctatgtgacctcaggcagaggctcaagtgtcttcatttataagatgggaaaaatcaatacctcttgtagaggtattataagattacatacaaatgagatcatgaacgtatgagatatgtccctggtacactactgggcacagaataatttcttagcaaacaatactaaattattgctatttttattagaagagaaagggtgggtgaggtggctcatgcctgtaatcccagcactttgggaggccgaggcgggtggatcatgaagtcaggagatcgagatcatcctggctaacacggtgaaaccccatctctactaaaaatacaaaaaattagctgggtgtgatgtgggggcgcctgtagtcccagctactcaggaggctgaggcaggggaattgcttgaacccaggaggcggagattgcagtgagccaagatcatgccactgcactgcagcctgggcaacagagcgggactccgtctcaaaaaaaaaaaaaaaaaaaagagaaaacatgactatcaaggttcccaaatatgataaaacacagtcttcaatatacaaaatcctgctggacacggtggcccatgcctgtaatcctggcttgagcccaggagttcaagaccaacttgggcaacatgacgaaacccagtcactacagaaaaaaaaaaaaaaaaagctgggtgtcctggctcattcctgtagtcccagctactgggcaggctgagatgggaggattgcttgagcacaggaggttgaggctgtagtgagccacgattgcatcattgcattccagcctgagtgacagagtgagaccctgtctcaaaaaaaaaaaaaaaaaaaaaaaaaaaaaaaaaaaaaaaaaatcctaactacagctgtcaccagaaaggaggtccaatccagaccccaagagagggaactcacgcaagaaagaatttgaggcgaatccatagggaatagtgaaagcaggcttaataggaaagtaaaggaataaagaatggctactccataggcagaggagtagcactgacggctcagctgcttatacaattgttacttcttgatgatatgctaaacaaggggtggattattcatgagttttctgggaaaggggtgggcaattcccggaactgagggagtcttccctttttagaccctataaggtaatttcttgacgttgccatgacatttgtaaactgtcgtggcgctgataggagtatcttttagcatgccaatgcgttataattagtgtataaaaaaatgggcagtgagaatgaccacaagtcattttttttttttgagatggagtctcactctgttgcccaggctgaagtgcgatggcgtggtcttggctcactgcaacctctgcctcccaggttcaagcaattctcctgcctcagcctcccaagtagctgggactgtaggcatgtgccactacacgtggctaatgtttgtacttttagtagagatgggattttaccatgttgaccaggctggtcttgaactcctgacctcatgatctgcctgcctcagcctcccaaagtgctgggattacaggcgtgagccaccacgcctagcccagagatcacttttgtcaccttttagttttggtgggatttgggtggcttctatactgcgtgctgttttttcagcaaggtctttgtgacctgtgtcttgtgttgacctccggtgtcatcctgtggcttagaatgcctaacctcttgggaacgcagcccaggagttcccagcctcgttttacccagccccttttaaagatggagttgctctggtttgaacacctctgatacaacttttttttttttttttttaggacggagtctccctctgtcacccaggctggagtgcagtggcacaatcttggctcaccacaacttccaccttccgagttcaggcgattctcttgcctcagcttcccaagtagctgggactacaggcacgtgccaccacgcccagctaatttttgtagttttagtggagacggggttttaccatgttggccagacgggtcttgaactcctgacctcaggcgatccacccgccttggcctcccaaagtgctgggattacagaagtgcaccaccatgcccagccccattgttttttttttaaattgaagcaggtctgaacctgttacttcattgctatttttctctttttttttttttttttttttcagaaatagcctcaatcagaggcattacttcttcgtgacactttgctaactactgtaagtgccaaaaagtaatcatagtttttctgaaagtaaaagaaataccaaagaaaaaaaatcccaccctcaatggtcctaccccctaaagcccctcaatttatcaccatcctctttatcaccttcctcttcatccttacacttctctatttaaccttcatttagggaaggataaggagcttcctgggactctggaataaaaccaagacagactagggaacactgggatggttgggcatacctctcccctttttgcctctagttgcctttagcctactgtctgagggactgcctcccaagggtcatactgatgaggctccctaattactaaattaagtgacctttcttaggcctcaccttgcagcatgcatgctgttcattggcctcaattgtaagaatgggccaggcatggtggctcatgcctgttactccagtgcgtttggaggccacgggaggagagactgcttgaggccaggagtttgagaccagctggggcaacataacaagaccctgtgtctagaatttttttttttttttctgagacggagtctcgctctgttgcccaggctggagtgcagtggcacgatctccactcactgcaagctctgcctccccggttcacgcaattctcctgcctcagcctcccgagtagctgggactacaggcgcccgccaccacgcccggctaattttttgtgtttttagtagagacagggtttcactgtgttagccaggatggtctcaatctcctgacctcgtgatccacctgcctcggcctcccaaagtgctaggattacaggcgtgagccaccgcgcccggccaatttttttttttttaaattagctgggcacagtggtgcgtgcctgtagtctcagctactcaggaggctgaggcaggaggattacttgagcccaggagttggaggctgcagtgagctatgattgcaccactgcacaacctgggcaacagagtgagaccctgtcgcaaaaaaaaaaaaaagtaaaaatgcatgctcagtggaaaacattcaaaccatacacaagtaagtgcaaaaaaatgtgaagtccactcccttacactacactgattacacactagcacaggccacagtctaccactggtagattctgtgggtaatcttcccaaccaagattccccaatgaagattagtagtagttcattgggtaatcttctgatttttttttttttttttttttttttgagacggagtctcgctctgtcgcccaggctggagtgcagcggcgggatctcggctcactgcaagctccacctcccaggttcacgccattctcccacctcagcctcccgagtagctgggattacaggcactcaccaccacgcctggctaattttgtttttgaatttttagtagagacggggtttcaccgtgttagccaggatggtctcaacctcctgacctcgtgatccgcccgcctcagcctcccaagtgctgcgattacaggcgtgagtcacagcacctggcctgtcgttgttttttaactaaagacagagtctcactatgttgcccaggcctggctttgaacttctgggctcatgcgattcttctgccttggcctcccaaagtgctgggattacaggcacaaaccactgcacctggaccaatggacacttttgaaaactctcttcccccggcctttgtggtgtaatttacatccacagtttcctcccttagggtcttcccttccaccctcagtccagagctggcattgctgccaggttagcgctgctaaggggaagcttgaatcgatgtaaactttctgaatttagaatttctgctaggctcggtgactcatgcctgtaatcccagcactttgggaggccgaggcaggcggatcacctgaagtcaggagttcaagaccagcctggccaggtaaaacccccgtctctactaaaaatacaaaaatacaaaatagtgaaaccctgtctctactaaaaatacaaaaatcagccatgtgtgatggtgcatgcctgtaatcccagcactttgggaggctgaggcaggtggatcacttgaggtcaggggttcgagactagtctggccaacatggtgaaaccctgtctctcctgaaaatacaaaaattagctgggcatggtggcacatgcctgtaatcccagcagctcgggaggctgaggcaggagaatcacttgaaccctggaggtggaggttgcagtgagctgagatcacgccattgcactccagcctgggtaaaagaggaagactgtgtctcaaaaaaaaaaaaaaagaaaagaaaaagaaagaattcccggccttctcagtgcttgtgcaggtcaagctgagctccttaccgttcccatagctcccagtactgcccaacccggactctgctcaggctttttttccctgccaggagcaccagcttcccagggggctgtttctgagtcccaactcacacctgtgaccttctgattaccctcagctggaagaagcctttctctccacggctgctctagcattttactgctgtcgtccctcaaacacctccagagcaaggcctttttgtcactacacaggttccagcacagtaccttgtccacggtggcatttgtttttgtttgtttgtttgaaacagggtcttgctctgtcacccaggctggagtgcaatggcactcacgggagcctcgacctcctgggctcaggcgattcttctgccttagcttcccaagtagctggacgacaggcggcgccaccactctattttgttgctcctatttttagtagtgggagggtcttcctatgttgcccaagctggtctcgaactcctgggctcaagggctcctcctgccccagcctcccaaggtgttgggattacaggcgtgagcaactatgaggctggcatttggtattatttagtaaatatttgttgaaaatgagaaaagaaagacaagtgttccaaagaattttttttttaatagaaaggcaatgagagttacccttctagaattttacatgatgccacggtcatgaaaaacatcatatggttttaaattaaaataaacagaaaaaagtccaatgtactagaaaaaaattccagaagtggatttaaactgttataagaaaataatgtgagacacaccagaaaaaacacactaataggaaaaggaatttttacttttaaatgttatgaggatggccgggcgtggtggttcatgcctataatcccagccctttgggaggccaaggtgggcggatcacgaggtcaggagttcgagaccagcctggacaacatggtgaaaccctgtctctaccaaaaatataaaaattagccaggtgtggcgacgtgtgcctgtaatcccagctgcttaggagagtgaggtaggagtatcgcttgaacctgggaggcagaggttgcagtgagccgaggtggtgccattgcactccagcctgggtgacagagtgaaaccctgtctcaaaaaaaaaaaaaaaaaaaagaaagaaacaattagccaggcgtggtggtgggcgcctgtaatcccagctacttgggagattgaggctgctcttgaactcctaaccctggaggccgaggttgcagtgagctgagatcgtgccactgcactccagcctgggtgacaaagcgagactctgtctcaaaagcaaaataaaacaaaaataaatgttatgaggacacctggattataattagaaattttaatttcagtttatagttgatcacacttgaggaaattcagatagcaagctgtcacatagaaagtgcaaggattgggccgggcacagtggctcatgcctgtaatcccagcactttgggaggccaaggcaggcggatcacctgaggtcaggagttttgagaccatcctggccaacatggtgaaaccccatctctaccaaaaatacaaaaagtagctgggcgtggtggcacactcctgtaatcccagctactcagttggggagggggctgaggcaggagaatcacttgaacccaggaggcagaggttgtggtgagccgagattgtgccactgcactccagcctaggcaacagagtgagactttgtcttaaataaataaataaacaaacaaagtgcaaggatcactggaaatgaaggaaattagctttctttaactacttaaactagcaaaaacagaaaagctagtattggcagagctgtgaagaagccaatatatctgactgggggactgtaaattggttctgtttttcaggattcaatctttcggacaatatgtaagaaactggatatgtaagaattcctatcctttgatgtcataattttacttttggtaatttataagatattaatctcaaagataaaaaaaatgttcttagaagtgtttttaagagactgggtctcactctgttgcccgggctggagtgcagtggcacaatcatagttcactacagcctcaaactcctgggcttaagcaatgctcccgcctaagcctcctgagttgttgggactacaggcttgagccacagcctttagtagcaaaacaaattggaaaccacatgatggattatttacgtaactttaagtgacaaatatatggctaatgattctttttttttgagacagagttttgcacttgttgcccaggctggagtgcaatggctcgatcttggctcactgcaacctctgcctcctgggttgaagcaattcttctgcctcagcctcccgagtagctgggattacaggcacctgccaccatgcccagcttttttttttttttttttttttttgtatttttagtagagacgggggtttcttcatgttggtcaggctggtctcgaactcctgacctcaggtgatctgcctgcctcggcctcccaaagtgctgggattacaggtgtgagccaccacgcctggccagctgattcttacaaggaaagttctgaggactgtgagacagtcttacaacatttaatatgcacatactggaaacaagatgcatacctgacattcatctgtccgtttattcattcagttaactggtgtctttgttcattcattcagttaattggtgtctttgtttttgttttctttcctgaacattgaaaacgtaccaggcatggtatttggtgctgccaacaccgtggtgagcaggctaggcatgattcctgctttcctgaggcttgcgttttgaaagcagtcccttcccaatatagagtgccacaaataatctcaaacgtacactgatttcatttgcaggtccacttttttgttttgttttgttttgagacactgtctcgctctgttgcacaagctggaatgcaatggtgggattcactgcagcctcgacctcctgggctgaagtgatcttcccccctcagcctccgcagtagctgagaatacaagcacaccaccaccactggctaatatttaatttttttttttttttttgagacagagtctcgctctgtcgcccaggctggagtgcagtggcacgatctcggctcactgcaagctctgcctcccaggttcacgccattctcctgcctcagcctcctgagtagctgggactacaggtgcccgccaccatgcccggctaatttttttgttttttgttttttgtgttttttttagtagagacagggtttcactgtgttagccaggatggtctcgatctcctgacctcatgatccacccgcctcagcctcagcctcccaaagtgctgagattacaggcgtgagccactgtgcccggcctaatttttttttttttaaatagaaacaaggtcttgctatgttgcccaggctggtctcaaattcctggcctcaagtgatctacctcagcctctcaaagtgctggagttacaggcataagtcactgtgcctggcctgtaggtgcaatttttaagttcattaagagaaaaatcggctgggtgcgatggctcatgcccgtaatcccagcactttgggaggccgaggtgggtggatccggaaggtggaggttgcagtgagctgagatggcgccattgcactccagcctggccaacagaccgagactgtctcagaaaaaaaaaaaaaaaaagagaagaaaagaaaagaaagatggaggcaatcgactgctctaaaaccttagacctagaaacaggaacctgtctgacagtggggagaacgactcccagacaaactagcctggctgaataggaaggactcaacgggaagcagctttgcagtcatcttggtccccaaggaaaggggattctggtattaccccataaaaatttaacctcattcctgaaggatctaagtatgtaagggcattgatggtttgcaaagagcttggaagcactgtttatagtagcaaaaacaaaaatgtacttggaaagagatatggataaattatagaatagacacaatgaaatgtaacacagaggtggacgaatggactccagctatttgcaacaacatgggtgaatattagagacttaatgttgaatgggggaaaagatcccagaggactgcatatggtacaatactctttctcaaaccactggaaaaactgaaaaaataatacagtgggcacccatatactcttcacctagaagcaccagttgttaacattttgccacatttgcttatctcactctctgtgtgtgtgtgtgtgtgtgtgtggtgggtctgtttggtgaaactttgaaagttagttatagacatgacatttcacacctaaatacttcaacatgtaacaactaaaaacaaagacatgctactatgtaaccataatatctaatcacacccaagaaatagagcggatgcaattttttttctcatatgcagtccgtgttaggatttctccatttgtcccaataatgtcctttatagctgttttaaaattcagaattcaattaggtgtcatgtctctttaatctcctttaatctagaatagttgcttggccttgttgtcttttatcggcattgcatttttgaggatcccaggccagttgttttgtaaaacgtcccacagtctaaatttgtctgattgtttactcgttcctggattcatattaaacgtttttggaaagggaactcatgggtgatgttgtgtccttccattctgtcacaccaatgtcaatttgttcccttacgctaactttgaccatttgtttcagctggtgtctaccagatctctccactaaaaaggtcccttttccctttttctgagatgaagtctcactgtcacccaggctggagtgcagcagcacgatctcagctcactgcaacctccacctcccaggttcaagcaattattctgcctcatcctcccaagtagctgggattacaggtgcctgacaccatgcccggctaatttttgtatttttagtagagatggagtttcaccatgttggccaggctggttgtgaacccctgagctcaagtgatccatgtgcctcagcctcccaaagtgctgagattacatgtgtgaaccaccatggctggcctcccctttgtatttagtagataacctaaggaatttgaaccatagtcttaaaaaagcaaagttgttcatagtagcattattcataatagccaaaaactaaaaactagtgccaaactgaaaaccacccaaatgcccatcagcgatagaatggatgaattgtggcagcttcacaaaattgaatattagacagtgatgagaatgaacaagctccagttgcatgccacagcatggatggagttcacaaactgagccagacgctacttcataccatatgacccaatgtatagaaaacaccaaaatagccaggcgcggttgctctcgcctgtaatcccagcactttgggagtccaaggcaggtggatcacctgaggtcaggagttcgagaccagcctggccagcatgatgaaaccctgtctctactaaaaatacaaaaattagctgggcatggcggcaggtgcctgtaatctcagctactcaggaagctgaggcaagagaatcacttgaaaccgggaggtggaggttgcagtgagctgagattacaccactgcactccagcctgggtgacaaagagtgaaactccgtcaaaaaaaaaaaaaaaaaaaagaaaaagaaaagaaaaaagaaaataccaaaataaaagacacaactcatctgtgctgtttgcagtcaggagagtggttacctttagtgcgggagaagggtactcagcaaccagggagggtttcaaataaaatttagaaagaacaacaaacagggaagggatctgtaacaaacatggcaactagctcatataaaactatgagaaaaacgcaggaacctgcaatagttttaaggcaacaaagatcaaaatagataagactataaaagatctgaacggagttcaccaagaggaaatgccagtggctaataagccaatggaaaatgtttaaaatcactagcaaaacaatttcacctctcgcaacagtgccaggaaagattgatataataatatgttcaacgtaacattataattaggaaattctatttataagttaaagtaatagctaggaaatgatgaaatgaaacgtgatattatatcatggaataatatacagccattaagatgatttttacgaatatttttaaggacacagaaaaatccctttgctgaaatgttaagtgaaaaaagatccaaaaatgtttgcgtgtggatatgtgcatgtatatttatgtatatatatgtgtattacatgtgtgtgtatatatatgaatagaaatattttggatgtctagataaaattggtagaaaaaccacagtaaaactaaaagactgtactatgctatctactacataatatattatttaacaggggtgattgtagatgaaatttttctgttttaaacatgtctggaggctgggtgtggtgactcctgtctgtaatcccagcactttgggaggctgaggtaagtggatcacttgaggtcgggagtttgagaccagcctgactgacgtggtgaaaccctgtctctactaaaaatacaaaaattagcaaggtgtggtgatgggcacctgtaatctcagctactcgagaggctgaggcaggagaattgcttgaacccagaagatggaggttgcagtgggccgagatcacaccactgcactccaccctgggcaaaagagaaagactccgtctggaaaaataaaaaaacatgtctggaggcgggatgccgtggctcacgcctgtaatctcagcactttgggaggccaggagttgaagaccaccttaggcaacatagcaagaccccatctttacaaaaaataaaaataagaaataaacatgttcgtatcttgggccatggagtggcagcgggcatcttttgcttgtgatcagtcagtcacgtgaccccagcagcatttgtgtcctgttcccagtaccgtcctgtaattggtcagaggatgagcatgtgactcctcactgccagtcagagcctccctggaaggtggtgtttttcagcacagcccgcagatcctcatttgggacttacgtgagggcataggattcctccacgctggtggtcgagggtcagcctccgagattctgcgggagagactctcaagggtcaccagctggagctggttctgtgtctgcagggaaccacctggtgctctctccattaatagccccctaccgcgagttttctcttctttatctttgtgacttagcccagtgttcacagaaggggaggggtggagggttcaaacgctgtcatacacgtttgcttttcgaaaaacaacaggacacaaaattttataaacatgaaatgacagtacctggtacgtgactcgaatgcaactcagaagggtgccagtaagttagggaattggcctttggaaggcttccttctttttaaaaactataatgtttccatataatgtttgtgtaacaaatgagaaatgggagaccccattatcatttactaacggtaaatttacataaagtaagccagggtcagcatcagataattccgtatagcccatattttaaaccttcacattcctccatttcacagataaagaaattgagcctgagaggctaagagacaggatcacaggagcaaggaatgtgatccaggtctggttcctttgcatggtcctctagaaacattatatacattcatctcaaaaatatatatatatgtgatatatatacacacgtatataatatacatattgtgtgtgtatatatacacataatatgtgtgtgtgtatatattatatatatatatatatatatatatatatattttttttttttttttttttttttgagatggagtcttgctctgttgcccaggctggagtacagtggcatgatcttggctcactgcagcctcaatcttctgggctcaagcaatcctcccatctcagactcctgagtaagcaggaccacaggtgtgcaccaccaactgcagctaatttttttttctgtattttatgtagagatgggtttttgccatgttgcccaggctggtctcaaactcctgagctcaagcaatccacctgcctcagcttcccaaagtgctgggattacaggtgtgagccaccgcacctggctttccctgtaaaaaactttatagagatgttttcatgttgtttcataatgttcttctttcattcaggaatatgtcatcaatgtatttctgcccaacacttctactggctacatagggttctgttgtgtgagtggaccataacttatcccctattggacatttaggtcatttctctgtccttttctatttttttttttttttttttgagacggagtcttgctctgttgcccaggctggagtgcagtggtgcgatctcggctcactgcaagctctgcctcccaggttcacaccattctcctgcctcagcctcccaagtagctgggactacaggcgcctgccaccatgcccagctaattttttgtatttttagtagagacggggtttcaccgtgttggccaggattgtcttgatctcctgacctcgtgatccacctgcctcagcctcccaaagtgctgggattacaggcgtgagccaccgcgcccggccccctctctctctttttttaagagacagggtctcattatgttgcccaggctggtcttgaactcctgggctcaagctatcctcctgcctcagccccaaagtgctgtgtttataggtgtgatgccaccatgctgggcaggtcatttctcattgtcactgatagaagtgtcactgtgtacatcgtagcacaccagactccttgctcagacctgaagtcggatgtggatcccagtcagggtgaaaaggtgcttgacctacgtcaacttcatgcctctgaaggcacccacttctttgctgtcagcagtgtctgctccttggcaccaggattggatggttggtctcatccatctggagcctctcgcagaaggatcttctttggtttacttgtttgctcaccctctccaaatgtgctgggtttagtgtcaaactctgcatatatgagttcaagtcccgcagggttaagtttgaaacaaaggacagatgcacaccatatattccctatctctttttaattaccaaatacattaattgtagcaaatacaaagagaagaaaataaaaatcaacagctatctcataagtcagtcataaccactgttaacacctgggtatgtacagttgttctggaaccctgatgtaccccagaattgcttgggactcttgtttacaatctagatattccatcactccgagattctaattcagtagaactgctctagggcccacacaccggcattgcaaataagctccccaggcgatttggacacccaactttaagaacaagaatgcaaaagcgtctttctagacattacttgatttaaaagaaaataaaaatgaagttatactatatattcattttttctttttctttttttttttttttgagacagagtcttgctctatcgcccatgctggagtacagtggcatgatcttggctcactgcaacctccgcctcctgggttcaagtgattctcctgcctcagcctcctgagtagctgggattacaggtgcatgccaccatgcctggctaattttttgtaattttagttgagaaggggtttcactatgttggtcaggctggtctcgaactcctgacctcaggtgatccacccgcctcggcctcctgaagtgctgagattacaagtgtgagctgccgcgccctgccatttttgctttaaaaaaaaaatcagcaatagaatgtgaacttctgtgtctaaataccctttatacatttctgttgtgtgcatagtattccattagacgaatatatttccatttacttagtcaacactatattgttggacattagttgctcccccatcattgctattgtaaataatgctgtgtggctaaatctttgtatacattcttagttctttccttaagttaaattcctaggaaatgaattctggggtgaaagttttcattcttttgaaggtttttgatagatgctgccaatttttccagcaaaaaggttgccccactggggctgctactcccatgagctccctttgtgaggagccgtgaggtgagatcttcccatccatgatctcagccatccctgccaactacccagcgggcagcacgaggtacctgctcagtggtacctgctaagtgctcagtaattggtctacgcagtggacaggaggagtgttttcttcactgaccagaggaggacactgagagtggaggggtcaagtgactcgctcaggaactgggactcaaagccagctttgaatctagagcctgagttctcttcaccaccccatcaatttttaattgatattagagagggaagaacaggccgggcatagtggctcacgcctgctatcccagcactttgagaggcccaggcgggcggatcacttgaggtcaggagttcgagaccagcctggccaacatggcgaaaccccatctctactaaaaatacaaaaataagctgggtgtgatggcacacgcctgtaatcccagctactcaggaggctgagacaggagaatcacttgaacccgggaggcggaggttgcgtgactgcgcaagggtcctggtgagggtcccaggtcaactcctcccgtcccagtgtctgccaggccaaggggtgtgggcgctgccccacctctttccacactttcccttccagctgcgttgtgagtgacctcattttccctttacagctgcccttggagtttatttctgcagaaccggaatgtggctgaaagagtgcacaccctatctgccctgccctagcccttccagagagccccctacttttccctgacacaccctcctcttctccttgcatctccctcctgggagacctgaggaggggtccagagttcaaagacagaaacatatggtggtggcaagggactgggcacccatgggaattggggtcgggggaggactttgcatctggaccgtgggtttatttttcttttaattcttctgaagagcagcttaaacactggagtccttggccgtatttcctcttatcgtttcttcttatccagattgcagtgtctgctaagcctggttcccaggctctccgctgtgaaacacaaacagattcttgagctcgctgcccaaaactgggcagaggttcttgcttaaatatcaaaagcagtaatggccttccattactctgtgctccccaggtacagagggacaggaagccttctctccctttgtcctcccagaaacccaggagacaggtcttattcgtgtccttcccaaatcgaggcttgcggaagtgaggcagccaatcccagggcccaagggcccaagcagaggtgcgaacctgggtaggtccacattctagagctgccctcccaagccctccaccatggtgcctcctggaggtgggggcaggcccggctgatctgtcgtcacagaagttggcaggtgctcaatctttggctagaattttaaagggagatcttgaaggttcccaagcaagaaggattctaaattcacttgactttaaagagtgccatttgggcgcagtggctcatgcctgtaatcccagcactttgggaggctgaggcagatggatcacttgaggtcgggagttcaagaccaacctggccaacatggcgaaaccccgtctctactaaaaatacaaaaattagcgaggcatggtggtgggcgcctgtaatcccagctacctgggtggctgaggcaggagaatcccttgaacccaggaggtgaaggctgcagtgagccaagatttcatcactgcactccagcctgcgtgacagagagagactctgtctcaaaaagagtgccgtgccttgcttttagaaccaaacaagtgatctttgaatgttgccatgtcaggagggcagggaattgccaatgtgtggagcaacagctcattaggaaacgtgccttgatttctcagtcatattgtgctgtgcttcaaatgtgtctcatgtctcctatgcagcgtgtcacagtgtcatttgacatcaatcatgttggcagggcagcagaccccccccgccccaccgatacatacattttttgttttgttttattttgaaatagatacagccttcttgtcattcttttttttttttaattttttttaaaatttttttgagacaagagtgtcgctctattgctgaggttggagtggcactatctcggctcactgcaacctccgcctccagggttcaagtgattctcctgcctcagcctcctgagtagctgggactacaggcacccgccaccacacccggctaagttttgtatttttagtagagacggtgtctcaccatgttggccaggctggcctcgaactcttggcctcaagtgatctgcctgcctctgcctcccaaaatgctgggatcacaggcatgagccaccatgcttggccgtcattcttaatagacaccaggatactgaaaaatgctttgccactcagaaaaacaagggtacaagcatgatactatatggccactctcattccacttcagtgtgtgtgtatggtgggggcacaaaagggatgggtggagactgtggcaaaccggtgagcccacacccctcccaggtgggcagctgcaccagctcttgtggctggcaccctgcaggcatgctgcctcgactggaaatctacatttttatgtgtaatctctctcacacatcctgaagccaaacacaacttgcctgtgggctatcatctaaaattcggaggctagctggagtccgctctggaataagtctgcctggccatccttcccagctcttccccttattaactgtgttatcaagatgttaatctctcagttatttaatacctcagtttcctcatctgtcaagtgcagatcagaattttgcctacatctgagggttgttataaggattaatgaaaagccttggaacccactgtctggtgcctggacgcgcatggttaatgcctggcattctttgtgtctctttttacaagcgcagggtgaccacaggtcccagtttgccgggggcaggcctggttcatgcttgtggtgctggtgtaatgatcactaacttgccatttcattgtcggtattgacgtaaatgatatgatttgcctagagaagcaaatactggcacagtgctgtttaggactctgatgaggtttagacctaatagaaaggccatggtccaggttccttgaacatccctggacaagtcacttaacctttctgtgttcagtttcccgttctaaacgattggcaagatgaattctaagatccctccattcacagtcattctgtcatttgacaaacatctttttttttttttttttaaacgcagtctcgctctgtcgccaggctggagtgcagtagtgcgatctcggctcactgcaacctccgcctcctgggttcaagcaattcttctgcctcagcctcccaagtagctgggactacaggcgaacgccaccacgcccagcaaatttttgtacttttagtagagacagggtttcaccatgttggccagaatggtctctatctcttgacctcgtgatccacccacctcggcctcccagagtgctgggattacaggcgtgagccactgcgcccggccgacaaacatctttcacaagctcagactcatgccaggcaaaggtccagggcatggagaagccaggggcagagcctgggtcctcagtgggcacttggccagtgaaaacctccagtgcaggttgttgggaatctctaccttttttgtcaagtgttacttgaaagaccattaccaagaaattgaattgaaagttaatttttttctccttctttacggagacgagtttcactctgtcccccaggctagagtgcagtggtgcgatctgggctcactgtaacctcctcctcccgggttcaagcaattctcctgcctcagtctcctcaggcatacaccaccacatctgccaccatacccagctaatttttgtatttttattagagatggagtttcaccatgttggccaggctggtctcaaactcctggccttaagtgatccacctgcctcggcctcccaaaatgctggaattaaaggcgtgagccaccgcgccctgcctgactgttaatattttaaacctcagtttctcaggaactaatcattctggttgaatacattttgctacacatttcttttgtttgtgggggggtatctaagttgtttttttcttttaagtcagaaaacataaattttcactatggaaaattgtaaattacagaaaggcccaaagattttcttcatttctgctgactcttcaatgaaccagaggggcacgtgtaatatttccgctttcggttactccccaccccacacaccttgtagacactttgtcaaaactacattttaaaaaaatgctttcccccaaattcgtatggatgtctcctaataaagtcacgcagtcactcactggttcgtcctcaatcaaccaggcgtggagtcctaacctgtccatgattttaagaaagggcaggcgcacaacacccccgcacggagaaatgaacaggtgtggctcggcagaggccttccgcacctgcgttatggagtggtggccgctgtcggcgatggggtccccgcgagggcacaagtgatcgcgtggccacggcgaggctctgcctccgcccccgcgctccgggtcccattcccgaattctgccctcagcggcctggtcaatgaggttggatcgttggcccagaaagccacttcctgccgcgactggagccagccgtcgttgtgaaaattccccccacggggaaggaagtggctcttgggctgtttattttggctgcgggctagcagacggcgccaggggcagcggccacgcagaccgggcatttgtctagctgggcgggaggcggcggagcgggaagtgccacagattgaggggcgcacggcggtggagggaggggcgcccagtggagagggggctcacggtgacagaggaagtggcgccgcttgggggggtgcacgatggcagggggaggggtgctcggtggagggaggggcacacggtggcggggggaggggcgtgccgcagattgagggcgaacggtggcttggggaggggcgctccttggagttgggggcgcacgatggcgggggcaggggtgccccttgggagcagaagcagagaagactcggaactccaagagcaggtggatctgggagccccagatcctgggcactgggttgggggagaaaggggtcaaggtgtgcccgcccccgggatgctcggactctggggatccaggcctggtgacccccggtgaggaagagccagtgggaggaaagggccgggcgctgcccggagcagaggctggaggcgagagcgattgctgcttgctgtagcgcggccgctctccagttcctccggcaaggggggcctgggggaggactggccgaaaatactgtgatgctttggtctaagacaaaagccagcaggggatgagatcaaacaccatgacactgcgaaggggaaggccagcgcgggtgaggatttgccttcccagagaaccccaggggcggggctagcttccactcagcccgcattacccccacccccgcccccacccccggggcggggtctggaggatcagcaaaaccgcgggaaaggtgacagtcgccttccccaccaccgcctgcatttagtaggtggagggacagtcccacctctccacccattccctgccagagtgtgatttaatgtcttcctagaacacaggatatcacagtctgcagcacagagatttgaagtggggagaaaagcatctctggaaatgactggtgggggaagcccgccactgctctacaaagggtggcctgtgacagcaacagcgcaacactgggactgtgtgtgtaggttttaggcacaagcactttaagctgtgggaggaaagcagtttggcctggctgggatggaggggctgttggggaggagggaggagggtgtgaaaaggggaaggtggccggtagagggaaacccaccatggttcaggatgtcggtggggatgttgcacagttgggcggggtattgggcttcgatatcatgtaacccccgtcctccatggaagcaatgcccccctcgtccagcccaggatctaatgtgcatgcatgtacgtggacacagtctctagccaggggtggtgcagggtggggtgctgggtccccagggttggcctcttagcagggtggggctggcagcttctgctgactcaaggacatttccaggcctggcctggaggttaagcagctcattgaaaacagctgctcctcttggctggcggccctttcaggcggcctctggctctccctgggatgacccctcgcctctgcgtggcctggggaggggcagtgaagggagagaggctcagaggctggaggccaccctgccatgccctcagggatggaactgagtcccctccagggctggccagctgtcctccagcccccagctttccaggagctaagccaggtggtcgctgggccctgcgttcctgcctgcagcctttgctcctgcggttgggcagcttggaccgccttccttgtccttggaatgccttccttgtccttgtctctgcttgtgcctttcagggttttatgtgacatgcctctcattcaacacatatttgttgagagtccgctgcatgccaggcaccatgctagaattaacttctcatctgcctccttcatctgtgatgtcttgtggagagcagccgtcttatctgaggtcagacctctggctgcctctgtggatgggctgagtccggggaaactgcagcaacagctgagggttttgctccagagacacaaactgttgtcaagcctttgcactcagcctcgcgacttcaccaaagcattgtgtgccttgaagcagacaggacgggagaggaggcctcagtgaccatcaaggaggaaggagatgggttactcaatgtagggcaaattgctttaaaacccagttgcccatgagcacaggcatgtttcccaggtgatgacctggatgtctgagaaacaagaagtgtggactacatcagaaatattcctatcaaactagacacggtggctcacacctagaaatcctgcactttggaaggccaaggtaggaggatcaggaggttggggccaggagttcaagatcagcttgggcaacaaagcaagactccgtctctacaaaaagtaaaaacaattagctggggctgcgtgcggtggctcacacctgtaatcccagcactttgggaggccgaggcaggcggatcacgaggtcaggagatcgagaccatcctggctaatgcggtgaaaccctgtctctactataaatacaaaaaaattagccgggcgtggtggcgggcgcctgtagtcccagctactcgggaggctgaggcaggagaatggcatgaaccccaggggtggagcctgcagtgagtggagatcgctccactgcactccaggctgggcaacagagcagactccgtctcaaacacaaacactttgggaggccaaggtgggtagatcacgaggtcaggagattgagaccatcctggctaacatggtgaaaccccgtttctactaaaaatacaaaaaaattagccgggcatggtggcgggcgcctgtagtcccagctactcgggaggctgaggcaggagaatggtgtgaaccctggaggaggagcttgcagtgagccgagatcgcgccactgcactccagcctgggcaacagagcgagactccatctcaaaacaaacaaacaaacaaacaacaattagctgggcatggtggggtgcatgcctatagtcccagttattctgggggcttaggtgggaggatcacttgagcccaggaattcaaggctgcagtgagctatgatcatgccactgcactccagcctggacaacagaacgaaactctgtctctttaaaaaaaaaaaaaaaaagaaaaagaaaagaaaaaaagaaagaaagaaatatttctatcacacttcatttatctggaaagttcatttctatctatcaccttcacccccaaccgtgcagacttaaacttttccatggattgcttcatgagttcagcctctccagcttcattataaacgcatgagggcagaggctgtatcttcttttgattcctaggctggaatgcagtggcgtgattatagctcactactgcctcagactcctcggctcagttattcctcctgcctcagactcccgagtagctgggaccacaggcacatgccaccacacctggctaatttttttttgagatggaacatcactctgttgccaggttggagtacagtggtgcaatctcagctcactgcaacctccgcctcctgggttcaagcgattctcctacctcagcctcctgagtagttgggattacaggtgtgcgccaccatgccccgctaatttttgtacttttagtagagatggagtttcaccatgttggccaggctggtctcaaactcctgacctcgtgattcacccgcctcggcctcccaaagtgctgggattacaggtgtgagccaccacgcccagcctacacctggctaatttttaaatttttttgtagagacgggatctcaccatgttacctaggcttgtcttgaactcctgggctcaaacgatcttcccaccttagcctttcaaagtgcagggattacaggcatgagccactgtgcccagcatctggttcatttttaatttcccttacagtgcttcataaatgattatcatctgtatgggataagaaagcccccaagggagcagccagaaggatgattaggagaatgggctgagggtccagcctccaggcacctcctctgacatggccttggtgctgcagccgacccaagaggctggtctgacaggtcagaggaggtcctagagcagtaacctcccaggaaataaggagaatgggacagaaacccaatgcagacaagctaattaaaaaaggaatgcaggagcccagctggctgcagatgatcctgagtgtttcacagaatggaggaaagagcctcagggattcagggacaggacatccagcatctttgggactcacttcctctctttccatctctttgtcccgtttcactctgcttctctttatatattatcccctcatcgtaggaagcatggccattggcagccccagcctagcaatcttaacaaaaagggaaagctttatgtgttccaggggagttctctgatcagccctgtttgagttatgtgccccatcactgtggccaaggggatagacactgtcatcagctcaagagtgagccttgtgcccacccacacatccacatagccagaggtacacaatacaaggagaacaagaaggggatgggaagtttcctgggcagataaaggcagctcaatgaggtcacagattgttatcgttgccatgtcttcattgtagagcccagcgccctgccagaccatatggtgataagggctgggatcatgtctatattgttcacaataccctcagtgcctgatgccctgctggcatctatgaaattctcaatacatcattgttggatgaatgaatgaataaatgaatgaatcacacccagccagtgctcagtgcacagctccctgcctagcttcattcatttctccatttactcagtaagaacatattgagccacagcttgatgcgtagcactgtgctaggcatgggttgattgcctacaaaatgcaagaagtggtctttgtccttggggaggagaatcccaagatccttgtgaggggccctgcaccttctgtggggggcacttttgctccctgcactgacacctgatgctcccatgcatatggatgaggctggggggtgggtgaggctggaggggccctctctggatgggggtggggggcatcaggcctctgcactctgagctccctctgcccgctttgtatgtgcttgatgaagcacgggtacaaagaacacagagccagctctcaggacgccttttctctttccccagcagttccagcccagcctgagcgtgcactccccctccactaggccttggagaaagagcctcttttcattgagggcccaggcccaccggccacttcgggtggaaaatgctctcaagaaccccctgaccccggcttggcagagtccccccggatccacctacaggaatcccccctcagcttctcctttgctttgcagagctcctgcacgcctctcctctgctttttgattcctcagccttttctcatttgctgccaaatgagaaaatgcaagaggttgcctttgtcctcttttgctgccaaatgagaaaatgtgacctgtgttcttcagtgcctcctccacattgcagtcttcagatctctgcccagcggagtctctcggcccttgggaggcacagagctccttgtaacgcccccagacacctgggattttaaaggtttgtttgctcttatgcccggcatttctcctctaactggattacaaatcctgcgaggggagggacggtgctgcgagtttccttgtggtcccagcattgcctggaacatgccatgcacctagcagaaagttgggtggatttgaacccagagcctaggatgtcagagggaggaggggccttgaagctgtgcctcatgtgacaaaggaggaaactgaggcctgaaaggtacttctgttggacattctaatcccgtcccctttctggacttcagtttcctctgtcaagtgaggggaggttggcctgaccctgggaaaagcccctcccgactaacctggacctctttcagacccttcattcaccgtttgctacaactgctacagcccacctggcattgatttagcacacttgtggattttctggctggggaggagaggaagataacgtcctcttgggctattgtgggctcacgtgaagttttgggcttcgttttccagtcgtatctctgagaaacatctacaaaacaagcaataatttttttccttttccggccccaggcccctttggctacctcctgccaaggccattttctgttactactgcctggagtagagtttctgagaaccagatacctactccttaaaggaagcttgggcaggcatggatcaagtcctggagctggtttctggtttctggtgggtggctgaaaggtgacctagtctgtttgggttgttataacacaataccgttaacagatggcttgtaaacaatagaaatgtatttctcatggctttggaggctgagaagtctaagatcaaggttcctgccgattcaatgtctggtgagggccacttcctcgtggacagctgtcttctcactgtaccctcacatggtggaataggtgagggtctctctggggtgtcttttattaggacgctcatcctatccatgaaggctcttccctaatgacctaagcacctcccaaaggtctcacatcctaatgccatcaccatgggggtttaagatttcaacacaggccgggcgtggtggctcactcttgtaatcctagtactctgggaggccaaggtgggaggctcacctgaggtcaggagtttgagaccagcctggccaacatggtgaaactgcgtctgtactaaaaatacaaaaattagctgagcatggtgacgcaggcctgtagttccagctacttgggaggctgctgaggcagaagaatcgcttgaaccggggaggcggaggttgcagcagtgagcagagatcgcgccactgcactccagctggggcaacagagcgagactctgtatcaaaaaaaaaaaaaaagctttcagcacatgaatttttggaggttgacacattctgttcatggcaggagggaaggagcaggttcaaggcaggggacccagagattagctgtggcagttgtcctaggggtactttaggaagctcactttgtcctgcccagagaggaaccccatccaagtgctgttagaggacagaggggcagggtccctgccccaacctacattcccatggtggtgttttgagcatcagtgacaggagctgtgggtactatgttttaggaaaattaatctggctgttggaacaaggagcagaaagataggctggttgtttgtgattattatctaggcatgaaattcgttcattcatgcatgtgttcatttgttccttcagtatttaagcatcactgtgtgtcaggcagaactgtaggtgctggggttacagtggtggagaagacagaaaacaagagtgtcagatagcgagttctggttctggaagtggcagagtagcttgtgtcagtctaactctctggccaagaatgcttttagactaagggaaaattataaaatatggtgattatggtgatttgaaggcaatgaacagcaattaaaaccagacagaggtagagaggaaaaaatccttgaaagtaaaaagtaaacctggcacatttaaccagcttttccctgaacacactacctggtttgaggagctcatacagaaagtggcagttttaccggttagagcttggggccactagaaaggctaacattgagaggaaatgttaggaaagcaaggagccatagaaattccttctacagattctccttaaatccttggtgactcctgaactgtgcatttgcagggtagggttctaagcagcccagcaagaaacagcagctgggaggtagaggtttcagttgctatctggtgctgaggaaacagagtttaaaatttaagttccaccaagtttgaggggcttagtaatcacctaaggttttcttttgaaatcccagaagggcctcaccttatgattaaatccaaggttaagagccacatctgaagactaaaggcaaaactcaaacaaccccaccctagcaaagcttaaaaccaaacctccacaagagcaaggtaatccactggtaatttaactgcctgccataacaaaatccagcattctttagaggaagatttttttaaaatccagattccctttaacatagcatccctgacgttcagtatacaacaaaaaagtccagactccttatgacattatccacaatgtccagcatataataaaaatttgcagatagtaggcagcaggagatgacccataatcaaaagaaaaaacagtcaatagatgcagatgcacagacaacccagatggtgaaaaaaatcagataataaatgccatgaagagcattataatcaagtgatatgatagagagtaactgtggtcactttacgattgggaggccaggaggatctctctaaagatgttacccttttttgttgtttgaaatgtgaaatgccaggtagaggaaataatgcataggcccagagataggaaacagccaggcttgttcaaggaagaacaaggaggtcaaagcgacttgagcaaggtggagtaacaagatttgagatcaggccgttagacaggaccagatcatgttaaattgtggctcatagtaagaggctgaatctcatttgaagaatgatgaattatctttgaagtaattcaagcaggaggaagacttacctgccttctgttgttgttgtttttttcccttttactatgagcgaggctgtcatttcaaatatttaagaggcaattgcattttcttcttttgctgtctatgcatatctcttcttcattttctactgcattgttgatactttccctaagtttcatgtatctatttttttggtagaagctcttctttcttttcttttctttccttccttcctttctttcttttctttctttctttctctttctttttctttctttctctttctttctttctccttccttccttcattccttccttccttccttccttccttccttccttccttctttcttaagactagtaaagtcagaaaggaggaaagagtagaacaaagactttggtctgtaactgactatgaacaaccaattgagataactcaccatctttggaccagccagaggctcttttaatattgtggacttaactatttgcctctaataaggcacatatatttttgtcatttatttgaattttgaccttgctgatggcatcatatgttggcattaaaaaaatctttttatgggaaaaaagttcttatgctattgaattcatcagtgttgtctatgaccttcaacattccaataatatttttaaattttttctaggactgatttatatctttaaaagattattctaggccaggtgcggtggctcatgcctgtaatcctagcactttgggagtctgaggagggcagattccctgagctcaggagtttgagatcagactgggcaacatggagaaacactgtctctactaaaaatacaaaaaaattagccaggcatggtggcatgtgcctgtagtcccagctactcgggaggctgagacagaagaatcgcttgaacctgggaggcagaagttgcagtgagccaagattgcgccactgcactctagcctgggtgacagagcgggactctgtctcaaaaaaaaaaaaaatagattattctgactgtctttggagaatggactataataggatgatgagatcagcatcggggaagagagagaacttgagatttggacccaggagatgagggccacatttcagctccttcccttaacaatcttacgactcttgtcatcaaattgcttcaccaccctcagccaatttctttaccaataacatagcataatgctgatttatagtcttcttactgtgccagatcctgttccaaatgctttacatgtattatctcatttcatcgttaccagagtcttaagatgaggaaacggcatagagagatgaagcactttgcccaagtcccatattcagtggcagacctagaatcgaagcactagctgccgggcacggtggctcatgcctgtaatcccagcactttgggagaccaaggtgggcggatcacccgaggttgggagtttgagaccaccctgaccaacatggagaaatctcatctctactaaaaatacaaaaaaattagccaggtgtggtggtgcatgcctgtaatcccagctactcaggaggctgaggcagaattgcttgaacccaggaggcagaggttgcagtgagccgagatcgagccattgcactccagcctgggcaacacgagcaatagtccgtctcaaaaaagaaacaaaaaaaagaaacaaaagaaaataaacactagcagtcggattcatcatttcaacacatgaaaagtatcctggggagctagtggctagtggatgcaaaagttctttggagattggatgtactccatatgtgtgttgtgtacataagtggcagtcagggaacaagaggaaggtgatggatgtcacagagatctgggtttgcttactgggcgtgggacactgggagtaggtcacttcatgtctctaagactctgtctgtcttttcttaccttccttccctccctccctccctccctcattccctccttcctaccatccatccctccctccctccttcctccctagtttcttcctttctttctctttcctccttcctaccctcccttgctccttcctttctttttcttcactgaaacataactcacatatagaatttacccatttaaaacatatatttaattgggatttagttttttcacagcattgtgcaactatcatgacaatctaattttagaacattttcgtcatatccccaaaagaagcaccgtgccctttagcagccactcccctttctcgtcacccacaggcaaccattaatttgctttctgtctctatgcattgaagcttcatttcttactctgtaaagtgggtgtgctgtggtggggggcaggttggatttcccccagtgacttctacagagggtgcctgctcagcgaggagataggtggaaagaggaaaggttgaggaagccaaagaattaaattgctgcgtaaaaattaaggcgtgaaatagttcaggggtgggatgagtggtctgggaagatcctagaagaaggaaaggatggaaccagtgcaaggggcagggggaagggtgagacacaatgcctccggatcaaaggagaattttggcagaaaaaccacgccatgtaatagagattgagattgaggttgcaacgtggtgtgtggtgtaaatgcctccactcctcctcataaaatcttcagaaaagtatacaggtgatgtgccgggtggagttgggtttgctttttttttttttttttttgagacggagtctcgctctgtcgcccaggctggagtgcagtggcgggatctcggctcactgcaagctccgcctcccgggttcacgccattctcctgcctcagcctcccaagtagctgggactacaggcgcccgccactacgcccggctaattttttgtatttttagtagagacggggtttcaccgttttagccgggatggtctcgatctcctgacctcgtgatccgcccgcctcggcctcccaaagtgctgggattacaggcgtgagccaccgcgcccggcctgggtttgcttttgagggtggtacagaggactgagtcctccctcctggtgagcaggggctagaacagaggtagtcctgcaggcctctgcctcatctgggcacaagggcttagcactgccactcatttccacctcagagggttggtagtgagtaccgagtgatttaacgtatgagtgacggctcaccatcctgcactgggcacatggtaggtgcctgtcagccacaccggtcatcaagggccaaccaggagagcccctgtgatgccttcgtgtcttgccttcccttccagaacccaacgtcttcctcatcttcagccatggactgcagggctgcctggaggcccagggcgggcaggtcagagtcaccccggcttgcaataccagcctccctgcccagcgctggaagtgggtctcccgaaaccggctattcaacctgggtaccatgcagtgcctgggcacaggctggccaggcaccaacaccacggcctccctgggcatgtatgagtgtgaccgggaagcactgaatcttcgctggcattgtcgtacactgggtgaccagctgtccttgctcctgggggcccgcaccagcaacatatccaagcctggcacccttgagcgtggtgaccagacccgcagtggccagtggcgcatctacggcagcgaggaggacctatgtgctctgccctaccacggtgaggggccgcttgcaggcgggagggtggggtccccgatgtccaggggactggagccatgagggacagattcccagtgacaaggcctttggcctctgtggacccttggcagtcacatgtttaattataataggaagcattttttaataattaagaaaattaacttcaggccaggtgcggtggctcacgcctgtaatcccagcactttgggaggccaaggtgggtggatcacttgaggtcaggagttcaagaccagcctggccaacatggaaaaaccccatctctactaaaaattcaaaaattagccaggtgtggtggagcatgcccatcatagtcccagctacttgggaggctgaggaaggagaatcgcttgaacccaggaggcagaggttgcactgagctgagattgcgccactgcactgtgcagcctgggtgacagagcaagactctgtccccccccccacaaaaaaaaaaagaaaagaaaagaaaaaagaaaaattaacttcaaagcatttaatttacttttgtaaaaattgcaaaatacatgcttgtaaagtcttcaaatagtatacaagtatataacataaaattaaatgaaaattcccttcccccaggcccactctccaggtgaaaccccattgtagccccccatgttgtcttaatgcctgtcttgcatgtggtgaatggggaccagagtcaccatgtgaggggctggcctcttgtggtggacagccccgtcctgggggggcctttcctgggagaccccctgagttccgagatagaactttgtggggacacagagcccatgggctgggtagctgagcagagattccaccgggctcagccctctgtgggtgacttggaggccctcttgcccagctggagtttggatgggattaggggtactagggagccccttcccagccctatgaggtgtgcagcaagacctctctctggttcctgggctgactcaacagcagaagaagccttaaagccactatggggtgccattgcctctcccacctgctgatccctgtgaacacccagcactctgggttttaggggatttctcctgagggtcgaggggcttggcagcctctggtgtccagatgccaagggcctggcccctgtccaccccctgcagaggtctacaccatccagggaaactcccacggaaagccgtgcaccatccccttcaaatatgacaaccagtggttccacggctgcaccagcacgggccgcgaggatggtcacctgtggtgtgccaccacccaggactacggcaaagacgagcgctggggcttctgccccatcaagagtgagagctgttggagccgtgggggcgggggcagtgttcctggagggaggctggtgctgaggggccccggggcccagggtgagatactgccccctcccctacctagtgtagccttttggtgggggagggtctgcactcccgagggaccctggagggggcctgaaggagagggctgtcgtggtggcaggtaacgactgcgagaccttctgggacaaggaccagctgactgacagctgctaccagtttaacttccagtccacgctgtcgtggagggaggcctgggccagctgcgagcagcagggtgcggatctgctgagcatcacggagatccacgagcagacctacatcaacggtgagccggggcctgatgcctgctcgtgcctctggagggcccgggccctttccgcttgtgggttggggagagggcgatggggagcgggggaggctggggctggggatcccctgttcagtgtccctccttgctgtcaggcctcctcactgggtacagctccaccctgtggatcggcttgaatgacttggacacgagcggaggctggcagtggtcggacaactcgcccctcaagtacctcaactgggagagtggtgaggcacaaggttgggggcgcagggcagcataggggccccgcgggctcttggcctcccatggactcctctcctcatgtcctcctgcagaggggcagtgtgggtaggggaagcaccgacctccacccccctccccagactgcgcccccctagcccatgtagggcggcgctgccccaggccgaaggtcttggtgcatatggactgggtgccagcctccactcacctcttcagccacccctgtgggcagcgggcaccagcgcacccagcagcctggacggggaggccggggcggggctggtactggttactgggtagaaggttcaaggcgacgtgcacccaggttagaaagcgcggaggaccccgtggtctggggcggagctggagctgagcaccaggcttcccgaactggctcaggcttccgagggagcagagggaggtaggaggttctgagcagggccccgggagccacggtgtgagcttctctctccgggggtgctggcgccctgccctccccacagaccagccggacaaccccagtgaggagaactgtggagtgatccgcactgagtcctcgggcggctggcagaaccgtgactgcagcatcgcgctgccctatgtgtgcaagaagaagcccaacgccacggccgagcccacccctccaggtgagccagggactgtgccgcagggtggggaggggctcccagggccagggacacagccacagagccgtggcaggcccagcctctcctccggttaccaccacagcacaaggggactctggatcctctgactcttatttcattgttcagttaaagtctgagcaaattggaatatgtcattaattcatttggggaacatgtgctgagatctgtgttaaatgctggcaatacccactgttacctcgtagagaccacagtctgctggaggtgacagacatctcaatgcagttagactatcccaggtcatgagtgattatagaaatatggatcagtgttagaggagcatagagaagaaactgattcagcttctgagagttaaggaggggtttatggaaataacatttgatttgggcctttcaaattgagtctaagtttaaaagatataaagaggtgtgggggaagggcattcctggcagagggaagagcatatgcaaaggtgtggaggcctagaactacactgcagctttaaggggtggtgagtgatggccgggcaccgtggctcacacctataatcccagcactttgggaggccaaggcaggaggattgcttgagctcagtagttcaagaccagcctgggcaacatagcgagaccctgtctctgcaaaatatttttaaaaaattagctgagtgtggtgatgcacgcctgtctactagggaggtcgaggtgggaggattgcttgagcctgcaaggttgaggctgcagtgagcctcgcttgcaccactgcactccaacctgggcaacagagcgagacgagaccctgcctcaaaaaataaataaataaataaataaataaatttaaaaaaaaaaagaaaaaagaaagaaaaagaaaaaaatggatggtgcctgttgcagtttgggtggagtatagattctaaccacttcaagtatggtcatccaaccagcagcacagcatccccggagggcttgttagaaatgcacagtcaggcccgccccagagtaattgaatcagaacctgcatttaacaagatcctcagatgattcatgtgcagacacagtttgggaagccctggcttaaagggcatggtgaagaagaggcaggttgcagccagtctctgcagggtcttggctgctgggccaagtttgggtggggccaggtaggctgtggggagcctttgaagatgtttaagccagggagtgtctggttctcgtttgtgatcatagagacagctttaggggcctcgtggaggagttggggcaatggacagggtctgctttagggattctgccccttactgctgtgtggccctgggcaagcagcttagtctctggggtgcagagtcctcattgcaaatggagaatgaagccaccccccttgcaaggttgttgtgaggaaggctggagatctggcctggcacgaaggagtttttctgtagttggctgtggatgtttactgtggtgtaggttggaggggctgtgcagtttcctgcgaagctgtggggtggtgaggagacttttacaaagaaaatatggcaacacacacacacacacacacacacacacacacacacacacaacactaactacagacagtaaagagtttacagagcaaaacttctgctcctgaccatggaagtcttgccaatgatcgactcaggactggtttttttgtttgtttgtttgagacagggtctcactctgtcacccaggctggagtgtagtggtgcgatcttggctcaccacaacctctgcctcctaggctcaagagattctcgtgcctcagcctcctgagtagctgggattacaggcgggcatcactacttcccggctaacttttgtatttttagtagagacggggtttcaccatgttggccaggctggtcttgaactcctgacctcaggtgatctgcccacctcggcctcccaaagtgctgggattacaggcgtgagccaccgcaccccgcctttttatttttatttttatttatttattttttgaaacagagtctcgctctgtcgcccaggctggagtgcagtggcacaatctccactcactgcaacctccgcctcccaggttcaagcgattctcatctccaggttcaagcgattctcatgctccagcctcccgagtagctgggattataggcatgagtgtgccaccacgcccggctaatttttttgtatttttagagatggggtttcaccatgttgcccaggctggtctcgaactcctgtcttcaagtgattcacccgcctcggcctcccaaagtgctggaattacaggcgtgagccacggctctggcctgattcaggactgctgaccactgctttatctcccattccgtaaggggccaggagcagaagcttgaaacgtcagcaacccgatctagggcacctccacctctagctggagggagccttgggccctagtccagtcctcccacaagcacctttctgaaggaaggggcccgctgggaggcccgggtgtgggcatgcctagcctatctgtggccccttaccaagtcctctgtcctctgggtcttcccggacctgcagacagatgtaaggcctcggatttccgcccctctgcccagcccatatctctctgcacgaggcatattctaggcaggttctgctttcccggtctcatcacttaagtcctgtcatttcgaaggcaggcgccccgtcgtgtccccaaagcatccacatttcccaagctcccttccggtccttgaggcccctcgggtctcagcagccactaaaatccgcttgtctggggcggcagcctcaggtcttagctcattggctaacaagagatgattgacaggtcctgagccagagagcgagcccaccgggctctcagtccgcccagctttgccgggtctccaggagcaggtgtggctggaccactggaatcccagtctgaggccgtgttctagtgggcgcgcagtttcctgcccgactaggcagaatcctgcccgagcatgacactgtgggtggtttggtgaagtcctgttttctcttgccaagaccaagtaagggcttgtttgcctcagctgccctcggatcccaacccctagaaggtgaacctgaaaggcatggaaatcggggcaagggagggcctgggacgggtggatttctcagccctggggttcagggttaggagttaggagcggggaaggagtcccagctgggggatggggccgatctgtagtgactttgagcacctcctaatgttctcggttgcccgtccaccaagacctcagattcctggtgggcttgcctgggccccattagtggctcaaggtcccgtttcccagttttctccctcctgggcttcccagacctgcacagagtgggtgctcaataaatgttatttgagagaataacagtgattccatttactaggcagggggccataagccaagcttgaatctcatagcaggaaaccccatttacagagggagaaactgaggttcatggggctggtttgtcctttctacccatcgtttattgactgattgattgatgcattgattgagataaggtcttgctgtgtcgcccaggctggagtttagtggtgcaatcatggctcactgcagccttgacctccccgggtcaagtgatcctcccacctcagcctcctgagtagcgggaccacaggcgcacatcaccatgcctggctaattttttattttttatagagatggggtctcccctttgttgcccagtctgttcttgaactactgggctcaagcaatcctccagccttagccttccaaagtgctgggattacaggcctgagccaccatgcctggcccacccatcgtattctgagagccacagccagaggaagtgttctgtcctgggtggaatctgccaccacgacttgggtctctgtcccggggctccagcagccctgtaaagttttgtgtttttttagcatttccaagacctgtggtggggaccgggattgatctgggagagtttggagaggaggtgactgggaggcctcgcctgtgttgacgtcaacccagtgggttggttcccagactgggcggctcagtccctgagcagcagcctcatgggtctctgcagacaggtgggccaatgtgaaggtggagtgcgagccgagctggcagcccttccagggccactgctaccgcctgcaggccgagaagcgcagctggcaggagtccaagaaggcatgtctacggggcggtggcgacctggtcagcatccacagcatggcggagctggaattcatcaccaagcagatcaagcaaggtgaggagctgcccgcccacgtgtctgggtggagggcagggcctcccactgccccacccatcctgtccaggagcctcagagaatgttccttcctccctactggtggctgaggctgacctctcaatgttttctctcccctcctctcctgctgcacccccagaggtggaggagctgtggatcggcctcaacgatttgaaactgcagatgaattttgagtggtctgacgggagccttgtgagcttcacccactggcacccctttgagcccaacaacttccgggacagtctggaggactgtgtcaccatctggggcccggtgagatctccctctccctatcacagggccacaaaatacacccccaacctccaggtgccaccccagctgaaggacatcctagttactatcagaacctgcctggaacctcttacctctcagcagtccccctcctccccaccaatgccttcccttccatgtgagagactgccggggcttgaatcctacctccacctccacctccaagtagccaagtcaccttgggcaagttactagagggtcactggggagatcagaggagttaattctcgtgaaaccttaggcacagtgcctggcgcattcttggtctcctcccagctgcccttccctgccagaaggtggcatcagaacccacattatgtgcagatactttgcaagcagggctgcactctgccagccctcgcccccagtgctctacccagtccagggtcctgtcatctcaagagattgttgggttttatgacaatttgccatggtttgggcttagatgtggtgtaagtgaaggaattgatggagggcttcaagcagagatgaaagacccttaaaaaagggacaaagccagctgagtgtggtggctcatgcctataatcccagcacattgggaggctgaggcaggcggatcacttgaggtgaggagttcgagaccagcctggccaacatggtgaaaccccatctctactaaaaatacaaaaattagccaggcgtggtggcagatgcctgtaatcccagctactccagaggctgaggcaagagaatcgcttgaacctggaaggcagaggctgcagtgagctgagattgcaccactgcactccagcctgggtgacagagcaagaccctgtctcaaaaaaaaaaaaataaaataaaaaggagaaagccgtagggacacagaccacccttcctagggacagacaggatgttctgctgtcacatactgcaaacagtgctgtggactgtagtggcagtcatttgccttaggggatgctatttaagaattttaaaacaattatgtattgagtatctaccatgtgccagtcatttttctgggtgctaggatacacaaacacgcctgccctcagaatggagcttagagacagacatactgctggctgggggcctgtggatactggggagggcgaagacagaagcaggggccgaggactaaattcctcctcagcttcatcagctgagattctggtctgggcacactggcctctgcacactctggccctgcaggcactagctagacgccttgggaatccaagctgtctatcctgccatcagttactctaacaatcttagccagtttgtttttgatatttataaaacgagttatcaataatgtaaaaggacgcctttcctttttttttttttttttttgagatggagtttcaccctgtcgcccaggctggagtgcaatggcacgatcttggctcactggaacctctgcctcccaggttcaagcgattcttctgcctgagcctcccaaatagctgggattacaggcatgcaccaccacaaccggctaactttttgtattttcagtagagatggggtttcaccatgttggccaggctggtcttgaactcttgacctcaagtgatccgcccacctcggcctcccaaaatgctgggattacaggcatgagccaccgcgccgggccaggatgcctttcccatttagacaatgcttgttaagtttcaaggcgtttgcacatgaactgcttgtgctctcatccaccctgtgaggcttatgggttcatcccgccttccccattgcacagctgggacacagacatgtcagaatcacacagtaagtcagagacagggccagctctaggaaccagattccaagaaggatttgggagatttatggggaggtgggggttgagattcttcctcaccctgtgtccgtaggaaggccgctggaacgacagtccctgtaaccagtccttgccatccatctgcaagaaggcaggccagctgagccagggggccgccgaggaggaccatggctgccggaaggtgagggtgtttctggagctgccctgagtggggccacctgtcagaggggctaccaggggagggagaggtggatgaactcctgctgcctcgcatggcatcgccctctcgtcggcacccccttccctgagctctccaaactgctcctttattgaaggagtgatactggatgggatgggacgggtgggcgctgttgggaggaagcagagctccccacccccagcccagtcctgagtccctccccatgggggaagccacttcctcgagacagcagagaacagggaggtgggggctggtctacccccgagtgccccctcagagtccagcctagtcatgtcaagcagtggctgccgaagtgaagtgtggcccctgtgcaccgccagtcctgacttccccctcctctgccgtctgacacagggcgtgtgctggtctgtctcccctggaggagtgaggccactcagggtggggctgcaccttccccctccttgtgttcccagccccagtgggcttctagaggatgtttagggaggttgagggggggggtgtcaaggaatgaaagctgtgtaagtgagtggggggtgagtgactgagggtgtgagggggtgacagaccctctcctcctccagggagtggagcaggggtgcaaatgctgtgatgggtgcggggagcttgcttctaaaagacactgcttggcccttggccccccccagcagccccttgcagccaggctggctcctcactctgttttcctttggattaagcccctaccacacccacctggaccccaaagcctcccccagaaaatgagcaggaaacactaacaggcatggccccatgggcgaggaagcagaggggagagcagagcccagctgcggagtctgtggactggcaaggacagtgcctggcccaggggctgtgtcatggctgcgaagaggtgaagggaggagtagagaggaattaccaacttctctggcaccaaggccagcctggaatttgtgtggggagtgttgagggtccatggttaacagcccaggatcaccaggggtcttggcacagcccctgccagcagatgaggcccccaccacacataccacatctgcttctcttctgccttggctcctgccagcctcgcctgccagggtctcgtctctgagcccctcctgccatccccgggccaggagcatcctgcgccgactccagctttgccaggccctcgaggactgcccatcccctctccatcctggcagctctccccagcctttagctgtggtttcccagccaacagtaatttccccactgtgtctcttggtttaaatgcccaagagaggagcctgaagggccattcatcttcccgagccgggtcactggccggtcgctggtggcctgccaatcagccacgctggggctgggcctccaccccagcttccacagctgtgggtgatggtggagggggaatgtggagaaacgaggtgcagaacacagcccagtactcaaaccagtcccctccgtcctgagcacgttcagtgatgtccctgatggcatctcccaccacaggatttatgggtgagggtggagagtcatcttccctacagacacccctcttctgtccactcttgagccagggttggacgtggcacagcccatcctgctactggctgggagaagaccaagtgacctacagtgaggcccggcgcctgtgcactgaccatggctctcagctggtcaccatcaccaacaggtacagcaggggcgggtgccctgactagcccttgcccatgtctgggcctattgtggtcccttcagcaaacagggtagcatctgccatcatgcccagagggacctggagtcctgtgaacctcagtgggctccagggcattttaaaatcttgtcagaagaatgactctcacttgttaagtgaccccagtgtagggcagggcccgggcaggcacaggtgtgggctggatacttgagaaagagaggccttggttgtgtctgattttctctactttcttctcagcaaagcaaggggtgcagagaatagaaggggcagctgggggttccataaatcagctgcagggctcccaggcgtccctgctttcttgagcaagttattggtcgggtgcagcacccgagctcccacggtagggcgtctggcctgtgactgggggattgggaagcagggagatccctgccctgaccagcctgtctcctgaaggttcgagcaggccttcgtcagcagcctcatctacaactgggagggcgagtacttctggacggccctgcaggacctcaacagcaccggctccttcttctggctcagtggggatgaagtcatgtacacccactggaaccgggaccagcccggtgagccccttatttgacttgccttggtgaagcgaggagggaggccagggtggactggccctgccagcaccgagccccagggcttccccataaacagatcattggtgcactgtggtgtagtgtctatgagcacaagctctgaaaccaaactgcctggctccgatcatgactctgccatcttttagctgtgcatcctctgagcctcagttttctcatctgtccagtgggaataatgatcctttcctcatagggatgacatgagtcttaaatatgtgtaaagtgctaatatgtgtaaagagttaatgtgtgtaaagtgtctagattacttctctatctgggctcacaaaaaagaaacaaataatctcttctctatctggactcatttaaaaaatgtgttcagaatactgagcgcaatacaagtgcttgttattactattattaccatttcacattcattatctttctaaccccttcaataacctgatgaggtagatgatgaagcaggctcggtgaggttaagcagcttgcctgagccctcacagtgggtgaacccagagccagggctctgcctccattcccttcctccctcctggctccaaccccagagagcatgtctctgaagaggtggccaagctggttcccagtgtgagggccgtgctagtgccctgccgggatgtgagggaggaccagactatgaatccttctcagagcctgggtctcccttccctctccttcagggtacagccgtgggggctgcgtggcgctggccactggcagcgccatggggctgtgggaggtgaagaactgtacctcgttccgggcccgctacatctgccggcagagcctgggcactccagtgacgccggagctgccggggccagatcccacgcccagcctcactggctcctgtccccagggctgggcctcggacaccaaactccggtattgctataaggtagggcagcctgttggccgggtagggggcagggggaggacaggagcaaagagacagtttggatggaggtcccagtgggaccagccacaatccagagacacaccaggctgcagacgggtgatttctggtgagacttgtccatggaatctggaggcctggtgctcagtaatcatttgaggaattgagggaaccacagatcattgatttcagaggttcccaaatgttggggccagcctagctgttcttcagaattgcttggggaacctgataaaaataaaatcttggccgggcgcagtggctcacacctgtaatcccagcactttgggaggtcaaggcgggtggatcacgaggtcaggagatcgagaccatcctggctaacatggtgaaaccccatctctactaaaatacaaaaaattagccaggtgtggtggcaggcgcctgttgtcccagctactcgggaggctgaggcaggagaatggcatgaacccaggaggcggagcttgcagtgagccgagatcgtgccactgcacgccagcctgggtgacagagcgagactccgtctcaaaaataaataaataaataaataaagataaaaatctaggctgtcacaatggagatttagattcattaggtctggattgggcctggtaatctgtatttttaatcacgctaggtttgggagccactggcagagtccgaggtcttttattatgcacagaaactgaagtctagggagaagaagggacttacccacgttaagctgtggctctgctgggattagagcccagatctccctgctggtcaggggatggggctcaggggccctctccagaaggtgactgtgccagctcccctccccagacctctgcagatgaacaggattgtccttagctagccttagccccctgtccagtaaggctccaggcccctcctctgccatggtgggaaaggcagtaggtgccccctgaggggtgggccagtggggacagcttagacagctggactctgcccctgcaggtgttcagctcagagcggctgcaggacaagaagagctgggtccaggcccagggggcctgccaggagctgggggcccagctgctgagcctggccagctacgaggaggagcactttgtggccaacatgctcaacaagatcttcgggtactgagccgggctgaggcgtgttaggagggcacccgcacacgtgtaggagcaggcatggccgacagacccttggttttgttgggcgagcagggggatggcagaatgtgggtgaccccagggaggcctgcatctgctgctggtgccaggaccatcttgtcctcactcaagtagccatggtgccctggcatcttgggagaacaggctggtgtgatccatgcactcataggagactgtgttttgctcaccatcatccccccagcaatgctccaacagacccacaaacttacatatgtaccccccaccccattgcaaaatctcccacatgctggtcctggcaagtgtttcccctcaccttacaccatcctacaatgacccacactcctcaatccacagtttttcctgagagataggaggagaaaggccgcagctatgaggatttgcccatgggcctccctctgagacaccacctctgtcctgggctctgagcattagcacgtggaatcccctagcactgggaaaatcgagatggatctgggcttcctgatagcttaattgaagggatctctcctctcagcaaacattgaaattacattatttgtctcataattacaatagctcatggtcatcacttctcaccacgtaccaggcactgtgctaaacatatagtcctcactcaagcctcccgacaaccctatggagcagacgttaacccctgacccttgtgggttgatagagaggttatttgcccaagttcatgggtgaacggatacttgaatccaggtttatttaactccagagccgtagatccctgccacctcctcatctgaacttcctaaactccgtaaagtaaaagcctgcagaatcttgctggacagggcacccccacccaaaaggaacccaaacaaaggggaggggccactgccccttgagtggatggcttggtccagctctccccagctctgtcttgtggggagaactttaccgaagtgacctcaacgctgtatcgatgggtcaatgtgaagcccagatggagaggccccaggccctgggggctgccccggtcacagctgcaagggacagggggcacgtttgggttcctgcccctctcacttcccatctcttccgtccccactcctgggttgtgctgaagtgaatcagaacccgagatccacgagcagcactggttctggatcggcctgaaccgtcgggatcccagagggggtcagagttggcgctggagcgacggcgtaggggtgagggggcctggggtacttgggactgcgaggccgggagcttggtgggcggggcctgtttggggcggggcctggaggtgggcgggttttcttgagggccgggcccccagtcggagccggcttcaggaaagcaggtccgagaggggtcacccggcccccggtgagaattcgcagctcaggccaggcctcttgttcacctgttccgggcatgggggcggcctgcaccttgcgcctcacgttcctcttccctccacccgcctcctccagttctcttaccacaatttcgaccggagccggcacgacgacgacgacatccgaggctgtgcggtgctggacctggcctccctgcagtgggtggccatgcagtgcgacacacagctggactggatctgcaagatccccagaggttggccggagtggcgctgggggacgcgggatggagcgaagggtggcggggccaggaattccagggagggtctcctttcctcacaacgtctttgtccttgttcccctaggtacggacgtgcgggagcccgacgacagccctcaaggtgagcaccccccagcccatcccgctacccatcgcgtgggagagggcgtcaactctggggtaagtcccgagaggcctgaatgaaatggaggggatgaggagttccggtcgagagaagggggacggggttggctcggacggaggcagccacagccctgtttgcttccgtgtgggaggcgaggcaagcctggggcctggggcctggcacggtgcctgcctgggtccggtgtgcctgcaggctcgcctgctgccgcctggctctgccccggccctgccgcgcccgcctccggggcctggcgtgcagcctctgcctggccgccgctcccacgcccgcgctgctcctgcaggccgacgggaatggctgcgcttccaggaggccgagtacaagttctttgagcaccactccacgtgggcgcaggcgcagcgcatctgcacgtggttccaggccgagctgacctcggtgcacagccaggcggagctagacttcctgagccacaacttgcagaaggtgggcattggattgagcagggggctgcaggctgggggagggcaggcccgggatgagggcagggggctgcctacccacacctgcccgcctggcttctccagttctcccgggcccaggagcagcactggtggatcggcctgcacacctctgagagcgatgggcgcttcaggtaggaacccaggcaggcagcagatgtggaagggggctggctgtccacacacggagcacagaggcagacttgcatttgaatccagccctgccccttccttgctggctgtgtggccttgagcaagatacttaacctttctgggccttggttttctcatctgaaaatgggaatatgaggcctgcctggtaagatttttgtgaagattagaaataacatatgcgaagtgcttacgcagcatccagcacattagttactaaataatggcagctcctgttacgtctggtgtcattcatcatgactaaggccctctcggggaagtgggcagaacatatgatgatccgggggcctctttgtatttggtgcctacttaccatgtactggggggcttgaggcaggaaggaccaggagcacctgggactcagaatttgagcttgtctttttgcccttgggcttcctgccctggagtcctcaggcttcttttctggagcagcaagtgtccagggacagctggggccttatctagaggcaccaggtccttgggtctttgactgccctgagctcagtagctccacccctcagcctacagccactaaaccccagaacctgggcccttccctgcccccattcctgcggccttcattgctgcatccggtggaggcccagctgggggccggtgctggagttacctctgctccatgccattgcagatggacagatggttccattataaacttcatctcctgggcaccaggcaaacctcggcctgtcggcaaggacaagaagtgcgtgtacatgacagccagccgaggtgagggcaaggtgggggcagagtgcgcagtcagctgtgcaaagggttaatgctgggcgagcctgggcagaagtcatcagtctgttctcattctctttgttcccacaacccaataaaggctagactcagcgaggggtggacctgtctccatggtccagaagacttgaattcggagctggacacaggccctgagcctctgcccagactcctctcagggcatgaggctgagtgtgctgccagccatgccctgccctgctctgccctgggggtgactgccctcccctcccctttccgcagaggactggggggaccagaggtgcctgacagccttgccctacatctgcaagcgcagcaacgtcaccaaagaaacgcagcccccagacctgccaactacagccctggggggctgcccctctgactggatccagttcctcaacaaggtaggaggtggcaatggggcacccaagggagtcaggggagaggacgtgaacagggaaaggctgagcctcaggagtcctggccttttggcagcaccaaactcatggcctcttgcctgtacccaccaacttctctttcacctggctccagtaccagggccagactccttggaaaatgactcactgtagtagcaccttccaatcctccgggaagcaaggttgtccaaataatttggtgagtgttctagatcagtgattgccaaagattttttttttttttttttgagaaggagtttcactcttgtcacccaggctggagtgcagtggcgcgatctcggctcactgcaacctctgcttcctgggttcaaccaattctcttgcctcagcctcccgagtagctgggattacaggcacctgccaccacccctggctaatttttgtatttttagtagagatggggtttcaccatgttggccaggctagtctcgaacccctgaactcaggtgatcacctgccttggcctcccaaagtgctgggattacagatgtgagccaccgcgcccggcctgattgccggcctgattatcaaagattttgataatgaactcctattagtaaaacaaaatattgagcttacatgaccaaactatgtgtgtgtacatttaacttatatatgtatatgtgtgtgtaaataaaacctacttccatactaatatgactaatattatatatagtaaaatatgtataagaacaaaagagtataaaacattagctaaagatttttaaatacttttaagtttaaaacatttttttggctgcgcgtggtgggtcatgcctgtaatcccagccctttgggaggctgaggcgggtgaatcacctgagattaggagttcgagaccagcctgaccaacatggagaaaccccatctctactaaaaatacaaaattagctgagtgtggtggcacatgcctgtaatcccagctactcgggaggatgaggcaggagaattgcttgaatcctggaggcggaagttgcggtgagtcaagatcgtgccattgcactccagcctgggcaacaaaagcgaaactccgtctcaaaaaaataaacaaagaaaaaaaaaacaacaaaaaaaacaccttttttttttttttttttttttactagtggtatgaaaacatttttttgtgctcactcaaaagtgattaattggctgggagaggtggctcacacctgtaatcccagcactttgggaggctgaggcaggaggatgacttgagcccaggagttcgagaccagtctggacaacatggagagaccatgtctctacaaaaaataggaaaattaaccaggtgtgatggtgcacacttgtagttccagctacccaggaggtgggaagtgggaggatctcctgaacccaggaggtagaggcttcaatgagccatggtcatgccactgtataccaccctgggtaatggagtgagaccctttctccaaaaaaaaaaaagatcaattataataattattgtttaatatgctcactttggcagcacatgtacaaaaagtgaaacaatacagagaagattagcatggccctgcacaaggatgctatgcaaattcctgaagggtccatattttgcgtagttcatgaaagttgaaggttgttcaacaaaaaaattgtctaaataattttaataagagcaatgtgattacatgtacttcacgtttttaaaaaattttagtctgacactttatgactcatgactcacaggtctaacgtgttgaaaatcaaagttatttcaaaacatgcatttcatggtggctatagattaaatatgcctcacaaagacaaatagattgaagtgaaaaaagttcatccatcatttctaaataattctccccatttttagtccttctaccaattaaacaaacatttttgtttaaaaattggctagtaggctgggacgctgagcactgggaggatcacttgaagccaggagttcgagaccagcctgggcaatgtagcaagaccctatctagaaaattctttttccaagtgttttgagtgtgcaggtaggaaagtttggggcactgacattaatcactatggatgcatttctcaacacgtttttacaacaccccctccatagtgtgagtttcttccccacagtcgttatttttccatgcacaggctgatttattagacctgattagtccttcattgtttttacctggcgattgacaacgagttcataccaggaagagaaggttgtcattttccttgttatgtgccagggtaattggcattaatctcaagccatggcttctttgcaggacattttaagaacacttagccctgttgtgaagattagattagttaacactgaataatataatccacaaatccttgtcatacacaggaaggcagccagcctcttagtgtcatggatctcctgccctcctcagaatattcaaaagaacattacacggccaggcgctgtggctcatgcctgtaatcccagcactttgggaggccgaggcgggtggatcacctgagatcaggagtttgagaccaaccagggcaacatcgcaaaaccctgtctctactaaaaatacaaaaaattatctgggcatggtggtggacgcctgtaatctcacctactcgggaggctgaggcagcagaatcgcttgaacctgggaggcagaggttgcagtgagctgagatcgagccactgcactccagcctgggcgagagattgagactctctctcaaaacaaaacaaaacaaaaaccacacaaaaaaaaaattacacctcttctaccttaaaaaattaaggcatgtatattattaaaactttggaaaatacagaagagaaaccaaaactcacccaacactctctagagatcacagctatcaatatttgttattctccttcctgcctttttccatggaattgagctcatactaaataatataatttcctacccaactcttctttctctgtatcatattttgagcatctctcatgttataaagtttttccaaaaacttgttctttttccatccactttttaaacagaatgtattttatatatgtaataggtcccattcttaatcatcattgtcaagataccagttactctcctgccctgtggaaagttctgtttgtttttgtttttgagacagggtcttgctctgtctcaaaaactgctggagtatggtggtaccatcatggcttacttactgcagcctcgacctcctaggcttaagtgatcctcctgcctcagcctcctgagtagctggcactacaggcttatgccaccatgcccagctaatttttctattttttttgtagaaatggggttttgccatgttgtccaggctggttttgaacttctgggctcaagcgatcctcctgccttggccttccaaagggcagggattacaggtgtgcgccactgtgcctggcctgtggaaagctctggaagtatgctagggtgttcactccttcactgcctgccctcacacatcttgctttactagttctgtgcccttctttgtgtccctatagcatttggatgtaggtaaagcatttatggcagctgtccccaacctttttggcaccagggactggtttcttggaagacaatttttccatgtactaggggaggggagggatggttttgggatgaaactgttccacctcagatcatcaggcattagattctcataaggagcacgcaacctagatcccttgcatgtgcaattcacggtagggttcgcactcctatgagaatcttggctgggcgcggtggctcagcctataatcccagcactttgggaggcctaggtgggcagattacctgaggtcaggagtttgaaaccagcctggccaacatggtgaaaccctgtctctactaaaaatacaaaaattagccaggtgtggtggtgggcgcctgtaatcccagctactcgggaggctgaggcaggagaatagcttgaacctgggaggcggaggttgcagtgagctgagattgcgccattgcactccagcctgggcaacaaagcaagactccatctcaacaacaacaacaacaacaacaacaacaacaacaaagaatctaatgccctgctgatccaacaggaggtggagctcaggctgtaatgccccttcgccccgctgctcacctcctaagaggccggggacccctggtttgtgggacagcctcttccactagctttaagctcctggagggcagggccactagcacctgccataccccttaatacacttgcacatggcagggatgccctcagtgtcggctggactgagctgaataccctccccctttagctgtcacttcttgctggtactggtgtgaccttgctgcttccaagtttatgatgaattctactcatgatttaagttgggcctcagcatggctctgaaactacttctgtgaaaccaaatccttgaactttgtgacagacctccaaaaatctgcattatttctgggcttacaattttttaccccaaatctgccatctgcatcagtaaggatggtgctggagctaattattaatagtcacagctctcactggttaagtgcctactgtgtcatgtactgttatctttaatccttaaaatgatccccaaagacaggctttgtattaccactttacagaagagtaaattgaggccataaggttgtcagagctggaatctgacatctcccccttacctgaatcccacccctgtctttatgactccaaagcttccctacaccctttctttttttttcttttgagacagagtttcgctcttgttgcccaggctggagtgtaatggcgtgatctcagctcactgcaacctccgcctcctgggttcaagcgattctcctgcctcagcctcccaagtagctgggattacaggcatgtgccaccacgcctggctaattttatatttttagtagagatggggtttctccatgttggtcaggctggtctcgaactccagacctcaggtgatccacccgccttggcctcccaaagtgctgggattacaggtgtgagccaccgtgcctggccaacaccctttattttccatcacactgcctctgagcagaaaatcattagatattcattttcctaagaaagagtcttcacttgatgagagatttcctacccagggcttttgtttgtttgtttgtttggaaaccttatagagctaatgaaagtgggaaaagagaaatgtaaaattacagagttagaagctgctgctaatagatcattcaacaatagagataaaagtgtcctagggctgggcgcggtgaaaccccgtctctactaaaaatacaaaaaattagctgggcatggtggtgggcgcctgcagtcccagctactggggaggctgaggcaggagaatggtgtgaaccctggaggtggagcttgcagtgagccgagatggcgccactgcactccagcctgggagacagagcgagactctgtcttgaaaaaaaaaaaagtgtcctagagatgatcatgtaagttcaaagggcaagataatggatgtcagacaacattcggaagggtgtttagcagaaagcaagatagatccttgtccccatcttcctagtgcttggcctaggcactgttgtcatagcctttgacggcccaaagaaatcctcccatttgaagatcccctggagtgtgggcaggtgtgtgtgaatctgcagtgccaagctgggaggtgctggaggctgccaagcagacccagctgtcctggttctcagatactgttctctcccggccctcaaaggccccccaggacctgctgctgaggggcgcacagtggcctttctgggtttgtggatggggtggtggggctggccattacatccccacctctgccccacagtgttttcaggtccagggccaggaaccccagagccgggtgaagtggtcagaggcacagttctcctgtgaacagcaagaggcccagctggtcaccatcacaaaccccttagagcaaggtagggccagcctatggggagcccccagtatcctctgacactgtccccccaaatagctatagcagagtcactcacaactgtcttctggggaccatagcattcatcacagccagcctgcccaatgtgacctttgacctttggattggcctccatgcctcgcagagggacttccagtgggtggagcaggagcctttgatgtatgccaactgggcacctggggagccctctggccctagccctgctcccagtggcaacaaaccggtgaggatgccctccctgttcccctccgcaccgcgctgccctaagcctgtggggctgcctttgccccagcatctcttgccccagggtctcccttcttccagcctctttgctcacattgcagccttctggggacagtagcacagggaggcagctgctggggctcccctgagcagctccctccccccagaccagctgtgcagtggtcctgcacagcccctcagcccacttcactggccgctgggacgatcggagctgcacggaggagacccatggcttcatctgccagaagggcacgggtatgtgtcaccagtcacctgggaaaccccagtggggccctggcaccgggctggatgctgggaccatgccaggaggaaggaatcatggtccctggcagagcagggctctgcttgggaagcagatgggcagaaaggcaaggtgccaataagatggaaaagcaatagcacccacaggtctcaggaggaagatttgggggtatggagggctcgttgggtcggggggagagctagacgctgggctgcatgaagtgctggcacgtgtggcgtcaaggaccctgaggttccaggtccaagacacctccagctccatgcgtaggtggcctctgcgccgggttccttgggtaggaggaggtcaaggccctcacctccctgtccatttgttagcaaacatgtattattaataacaacagggctgacacctaccaagccttggtctgggccaagcgccgagtctggtggagaccgggtctttgcctggtgtgcggccttctcctggccttgtgcctgggaacggggtgagggaagcagagcccagcctgaaccctgaccccttccctgtagacccctccctgagcccgtccccagcagcgctgccccccgccccgggcactgagctctcctacctcaacggcaccttccggctgcttcagaagccgctgcgctggcacgatgccctcctgctgtgtgagagccgcaatgccagcctggcctacgtgcccgacccctacacccaggccttcctcacgcaggctgcccgagggctgcgcacgccgctctggattgggctggctggcgaggaggtgggctcccgacacttttgccctgggccccagccttgcccgggttcccctccctgccccttcctgcccccgccttatccgcaccctatcctgactattcccttcctcccaccccatggccccccatgcccagggctctcggcggtactcctgggtctcagaggagccgctgaactacgtgggctggcaggacggggagccgcagcagccggggggctgtacctacgtagatgtggacggggcctggcgcaccaccagctgtgacaccaagctgcagggggctgtgtgtggggttagcagtggtgagtgcccacctgccagggcgggggcatgggcaagctgtcggtggccccggggagggtgctgagccacttcttaatcctgtacccccacagggccccctcctccccgaagaataagctaccatggcagctgtccccagggactggcagactccgcgtggattcccttccgggagcactgctattctttccacatggagctgctgctgggccacaaggaggcgcgacagcgctgccagagaggtgggtgaccaggccagagcccacacatggcgggcaggtggcacctcctctcgtgggcactcagacccatgagtacatccccacactgctctctacccataggcagcacttacacaagatgccctcgtgctctcacatgtggagaccatacatgacactatatgtgcatatgctgcccccccacacacttgcacatgtgcacacacacacacatgaatccacagactccacaccatcctctactcaggctgcagagaagagggctggagcagctctgggggactctgccccccccggagacccatccgccctgacgtgggccttctttgcatccagcgggtggggccgtcctgtctatcctggatgagatggagaatgtgtttgtctgggagcacctgcagagctatgagggccagagtcggggcgcctggctgggcatgaacttcaaccccaaaggtgggtgccctgtgtgtggggtggagaggtcaagcctcaggctgtaaggggctgccctccactttgccctgagccttgtcctggggcttgtcgggggacagggagtcggttctagaacacacctgctctcctccacctactcctgccccaccttgtccctgctccctcagtgccttctttcctgcaggaggcactctggtctggcaggacaacacagctgtgaactactccaactgggggcccccgggcttgggccccagcatgctgagccacaacagctgctactggattcagagcaacagcgggctatggcgccccggcgcttgcaccaacatcaccatgggtgtcgtctgcaagcttcctcgtggtgagcgccgggcaggcccacgctcagcctccttccaccccgtgccgctggtcctgggctggggctgggggctgcttcacaactgcagggggcacagccgatgggaaggcctgaacagaacggactgcgggcagctgggacccccgggataaattagtcagtgggatggactggacctgaaacttatcatccaaactagaccacaaggctcgggggtcagcaaccccctgtcactttgtagtggtcaagggcatggacagagttcaagtcctggccatgtcacttatcagtggtgtgaccttgggcagagtctgtggcctcagtttcctcgtatgtaaaatgggaataatagtagttccagactgatgtggtggctcatgcctgtaatcccagcactttgggaggctgaggtgggcggatcacttgaggtcaggggttcaagaccagcctggccaacatggtgaaaccccgtctctaccaaaaagtacaaaaattagctgggcgtggtagcacatgcctgtagtcccagctacttaggaggctgaggcatgtgaattgcttcaaccgtggaggtggaggctgcagtgagccgagatcgcaccactgcattccagcctgggcaacacagcaagaccctgtctccaaaaaaaaaaaaaaaaaaaaaaagtcccgacctcctagagtgctagtgaagctagtaaagatgaggtgagttagggaaggggctgacacccaggcctcccacgagggctgggctgagacctagctgagtgcagcatggcgttttccctttctgggggaacctgaagtcttgtctcttgggcctgtgcccccacagtaaccagaggtaggatgggagggggaactagagcctctttctccccagacctcccggcccaggcctgtgtgctttgtatgtttacttaagtgattattacgatgatcactgctattattaactggccccctcctcttgcccacagctgagcagagcagcttctccccatcaggtgagtgaaaggcaatgcccccaggtgggcaggcaggaagcactgctgggcctaacgcccacttggcctttcacgcccactcgccttggcagcgcttccagagaacccagcggccctggtggtggtgctgatggcggtgctgctgctcctggccttgctgaccgcagccctcatcctttaccggaggcgccagagcatcgagcgcggggcctttgagggtgcccgctacagccgcagcagctccagccccaccgaggccactgagaagaacatcctggtgtcagacatggaaatgaatgagcaacaagaatagagccaggcgcgtgggcagggccagggcgggaggagctggggagctggggccctgggtcagtctggccccccaccagctgcctgtccagttggcctatggaagggtgcccttgggagtcgctgttgggagccggagctgggcagagcctgggctggtggggtgccaccctcccacaagggctgggctgagacccagctgagtgcagcgtggcgtttccctttctgggggggcctgaggtcttgtcacctggtcctgtgcccccacaggaaccagaggtaggatgggagggggaacgagagcctctttctccccagagcccccggcccaggcctgttgatccgcgccccaggacccccttctttgcagagcccgaggagcctcccctgtcccctcgggcagatctgttgtgtctctcttcccacctggcagcctcagctctgtgcccctcaccctgctccctctcgccccttctctcccaccccttccttctgagccgggccctggggattggggagccctcttgttcctgatgagggtcagctgagggggctgagcatccatcactcctgtgcctgctggggtggctgtggggcgtggcaggaggggcctaggtgggttgggcctgagaaccagggcacgggtgtggtgtctgctgggctggagataagactggggagagacaccccaacctcccagggtgggagctgggccgggctgggatgtcatctcctgccgggcgggggagggctctgcccctggaagagtcccctgtggggaccaaaataagttccctaacatctccagctcctggctctggtttggagcaaggggaagggttgccagagtcctgggggccccagaggagcaggagtctgggagggcccagagttcaccctctagtggatccaggaggagcagcacccgagccctggagtggcccagtacccttccaagaggccacagtcccagccaggacaaagtatgcggcccatcctggtgcgacagcgtgggacaatgtgaacatggactcgaagacatggccctttctctgtagttgattttttaaatgtgccattattgtttttaaaaaaaaaggaaaaaagaaaagcaaacaaataaaacacctttaagaggcttgaaagagaaggttctgccttgtcctgtggtgagcctgcttcttcacgtctgtcccttcggagataactgttgttttggagcttgcaccacaggtgttttctgcagctggccattttgcgtctgtctctgggcctctaggggacactctcacccccgatctttaggagctcacccctctgggcctgcgcctccctctctctgttcctgggggcttgaatgtgggtgagaactcaggagccaggccatctgctgctgagcagccagccgtgcaagcttgggcaacttagcacacctctcaacatgtgcacagtggggagaaccggacccacctcctagggttgttttaaggatatgtgaggatcaagggagctcatctgtgcagagcacttagaacagtgcctctgggctctgcaagcgctaggcgttactgccgtttctgggctgcggctccaggggagcacttgatgtgtccaggccggccctgggtgggggctccacatcaccgtccttccaaggcagccatcatacctgccctctaacagcctgaaagttcacatgtgtccttagggagcctgggctctgaaaccacagaaggcagaatggacggcaggacctttactcacctgcttgttcattcagccggtatttgagctggagatgccaacaaaggaaggttaaccaacgccaatcgggcgaggcagggggaagctgctaatgtggcctgtgtgtctggggagggtctcactagagggagtgagattgactgcagcctgaaggaggtggcggagtgagcaatgcaaatatctgggccagggctaggggggcatccctggtgctttaggggaccagcagggaggcgaggtgggctgaggctgagatgagtcaggcagggccagattgtccaaggccctgaaggcagtggtagaatgtagcattattttcaggatagtgggaagtcaatgggaatggctaatcaggctgaccttttaacaagatcattctggctaggagttgagaaatagacaatggatgggaaacgggggagtgaaagcaggaaggctggtgcggaagctcttgtaataattcaggcacaacaagacggtggtttgttgggatcaggactgcagtagtggtcagattctgtgtgtgtgtgtgtgtgtgtgtgtgtgtgtgtgcgcgcgcgtgcgtgtgtgtgtgttttgccctgttcatgatatttaaaataagtttccacttttatgaatagacaatgcagtcacgcagtctgcattgcgtgggatacctaaatgatatcccaagatagatgttgcgcaagtcctgcccctgcccgtcgccctccagcctataccctcctgccctgtcagtttcctgtctttccagtgtttctttgtgaaagcaaatgaacgccagattggactgaagggatggcggatgcccttgctggggatgggatctgcctggggaaaggcagtgggagtcaggaagcactccaagcttcccgcctggactgcag

SEQ ID NO: 381 - DNA, 216189 bp, Homo sapiens
  source 1..216189: mol_type = genomic DNA
tgtggtagtgcagcctcggggcaagggcgcgttccctatcgcaggatcacttgctatggtaagccgcccaccctgcgcgctcctccgcgcggggaagaacctgcgcggcaggacgtggtgttggagttggggcgcccggagcgtggagtggggagacctgatgcagagagtctggagtcggagctgggggtgctgcaggtaggagcaggagcggggcggagagggaggcccgaagaagaccccacacaggttggcgcagcggggcttggggaggcttcagcccagaagtggagagggttgacagacgcctgcctgattagaaaaagccgggagcttgggaaggagacgggattgaagaagccacccggcagggaggccgaacggcccagagctctccgggtaaaacccgcctgcggtgatctgggaagtgtgtctccacctagccctgcgagcagcggccttcctcccgcccgttagaagggcgctgtgctggagtacgaacccggcccagagaagccactcgcccttctttgtcacttaaaaccctgtcccgacgcggatctcacgtctagacctctgtctttaaagcggatgtagagcgcgttctaaccgttccctaaccattgtgtcaccgcgaaaggccggggctgtgtggaaccgtcccgcacgtgtgcgatgaatctggctccgctgagaacggatccgtgggctgtctggcgcgggctggggcagcagccgagagttagtctacagagctagggcccgagggtggacctgcgtccgcgtctcgtcacgaaaggaagctctttttggagaggcaaaacgtggtcgcccagatccggcgcagctgtagccgtgggcgctgtgcagtgacagccacacccgccacctgtcacgatcacagttccagggaaaggggaagggtcaaggagaatccagcggaaacttcttcccatctcacgagctctcccttctctccgtggcccccaaacactcgcatttaacgaataatcccatcaagtgagttccagtccgatttaagcggtggttccacatagtctgttggctgcggaaacttctttggtgtcagagtccggtcttcccgagaccacgaatggccatgtctgtaaatcaaaaagaacgtgagatattagagagaaacgattgtctcaaaccgaaacagctctcctacgcgaaccccagatattcctgacttggagtagctaagattttatcagcattctgggaatttgcatgtcctctctctgaactaagattttcattttactggaggttgataatccgagacttgccatatccgttcacgcttcttcctggactttgcccgcaggataatttggtgaaactcatctgactttgaggttctgtcgtttagttcccttccccaacacacacacacacacacgcacacacacacacacacacacacacacacacagtcatccactccaagctccaagtaggaactgggcttggacaggatttttcccaagccgggagagctggcagatcagagagggactttccagataaatcccatctggggaaacgttactatcttccacaagcaatttttctaaaaatgcaaatgctcttttatagagctcggccttccctcctttaagaaagggcttgccgattcaaacctgcccgactcagctggattaagttgggcaagggagatttgccgtcagtctgcaacctggtggcagatggagatggaaccaagatttaccctggaagtaggatattagtcaatggctgtcactggggtacaatgttcagaacgatgcaaacagacacggagggttgattcttcttcagggaaatggctggccactcccttgatttgggagaaactaaactggccttctcgttcccagtcccagaacctccacccctttcgaattcttcccaacgggctgaccctgcccggcgcccaggagcgccctgggtatctcctggctgctctcccgaatccttgcgcgccgcgcccctaccaggttcactgggtgcacgtagccgttctcatagcggtcctcctgcaacagctgccgcaggtgagcgatgtaactggaagccagccggagcgtgtccagcttggagagcttagtgtcggggggcacccagggcaggctggtcttgagcctggagaaggctttgctcagcacgcgcatccgggcacgctcacgggcgttggccgcgttccgctgcgactgcttgcactctgcggctgagcccttggccgggaggggcttcttgccaccaccgcccgcgctaccacctgcgccgccgcccccagccacacggggccgcttcctcttgcagccttccgcgctgccggctgtgcccagagcgcagcgctcctcctcgccgtcggggtcctcctcctctgccgacgagttgtcactgggcgaggcgtagctgcgctctacgccgcggaggggcggcctcttggaggcggggaccgggtactcccgctgcagcccccgaagctccatctcctccggatcactcaccgagcccgtggacatcccgttgtcccccttgcccacacgcgtcctctttcctcccccctggccagtctcgctgtctccgccttccgctccctggcggaggcggaggccagagagcgctccaaggaagactaaaaacccaggccgggaagcgcggggtgagaaagcgaggtgggtggcgagagcgtgagcgcccctctgctgaccccggggagcgtggactacgagttggcgcccaagtccagaatccgcgcgcaccgcggtaagctgcgccttttgaaaaggctatctgtactccttggaacaaaccaccccgggcaaagaagagggggttgtaaagggggccaagaggtggggcaggggcgtggaaggggtggggaccgcttttctgcatgccgaagagcggttggtggaggcgggggaaggggacgtctctgcagagccgagatttgggctctgaagcccgacggcccttcaacatgtctgcgcaggataagtgagctttcggggagtgaaggggcacatcttgttcctaccgacggtgcttctacccccaggtaatcttagcagtggcaaagattaccagacacttagaaacgacgggattccgacctctgcttgcctgccagtctttccagtagaactcagttttcaagttaaccattcatgatgtatgattgtctacccaagccttgctggacaagagaaaaagcagaacaggcaaacaacatccaacaatgcacaagttacctctcattttcctcctccttttcttataatataccttcatggtttacaaaaatggttacaatggttcgttgccttttcaaataacatctgtaacttaatgatattatctccaatttgcagaacttgaagctgagccgcctagatagacgttaagtaaaagacccaaacttattaggctaagtagaaaaaaagattcaaaatccgcgttttgaaattctggcccgtcggtattctagtcagctccgtgcctccgggtcacacatcactggatgttgtagctggtattttccactatcttgagagttccatgcgtgatgtgattttgttttaataccacaatgcgtgtgttggaggatccggccctaaagctttgcattataatgtagggaatccttgctattgtatttaatagattgtgtattgaagagcgagctcctggaagcagaatgctaagttagcacaatcgtccattcaaagtaaaaacgacaaaggagcaccctgaatgatcatgttccattccaaacaagactaaaacatcctgctcttccacacaagaaaacacaacaattttgcagtctcattatttcctaactcgaaggtcatcgcagttcctggtcaggggataagtacgtctgtggatacgggccccagtggtcagagactgagtgcccgctgtgtgcccgtcactgtactcgcggcttgtgagcagctcactgagtaataaaacccgtatgagtttggcatatggttaccccattttacaatgatgaaactgagtcgtcacacaggcttaggtgttcacttgttcttttcctgaaagtccacaggctcccaagctgagcaaggtgcaaggggacctatgtggagtcagtccaggacagagctggcagagatagctgggccagcctggctcccgccagttcgtacagcagaacaaatgcgtccagctcgatggctgaagtgctgcaacaggtggctggcagaggctgacttcatcactcaggcatcattccaccttagtctcccaggccacgctacccttagcaggggcgttttggggccgggggaatgtttcacataacccctccggctcacccacatttgcaaaggttttctccctgtacaagttgtcttttggttgggggcagggggtgggctggttctgggacaatgtgaataaaaagatcatttgccctcagctctctctagggtagggaaatgcagggaatatttgacagagtgtagaaatctttcctggagcgtttgaacttgaacttgactctaggatcgccttgccaggtgaaggagaggagagcgacaaagaggggcaaagagatggaccgaggagagccaggctagctctctgcaacgactattgatgacttgaagctatcagtataaatatatagtctcacacattaggggcaggcgaataggtttttaaaatctgaattgtttatacaggtgcagaacaaagtctttctttagaaaagattaatggtgaggagagcgctagatttctctaaacagtcacaaaaactatacccagcctcaacgctgaggaggtcatggccagtttctttatttcttgaagaaatggtctgaccccaccagttcgggcttatttttcacagcactcgcctttccctccctgtcttctttctctgtcttcccctccctccctacttccctccctttctcttctactccatctcctcaccctccctctgttcgctttcaagaaagtcagctattttattttgtttgtttcatcatctttcatttaacctccatttctttcatttttgtgaaattaagttatattttcacttgtaactctgttttcaagttgcagactggtaatgaaggttaggaaatgtaccttatatgcattttttataagcatataactgcagtttgctttaacatgtttgtaatatctggcatttggtcacctccttccactttcaaagtgctattactttttcttctccttggatgattacaacagcttctcgagctgaacagtgtaagtataactctctcttttgaaagcccagtgtttttcatggttttgacaagtgacatactgaaatgaataatacagcctttatttttatcttataaacacactgaaatcaattcctatttgcttatgctttacaaactcttagatgtgaaacaggtatagactgtttgtgtgtacatcaatggtcttgaaattctttagtgacatttaaaaaatattcaatggggtgagtagggcttaagttgcattataaaacaaaatatttaataattcttttaatattacctttaatatttcttcatcctggcttccgtgcttgctggatatatgacttctggaatttgcattttttgagccctagttttctaatctataaaatggattatctctctgagcggaagagaaagtatatgagcagttggctaggtcagagcctggtacatgggagaagatcagtaaatgctagttagtattatgaattgccttgcccaatatcacacagctagtaaaagttagggcaatgacctgacccaagttttgtactccagggcctattctgggtttcagatagtaccagggtctttcatttgctttgactacaggctgctagggtctgaagtacatggtctcatcacatgacatttttcacaggtcccatgagggacttcactgagggaaaaatggatgggacgtcgttagaaattttcttttcgtcccccaaattctctcaccctaaaattgcagtgcttttccaagccttactttccctactggcataaaggattaagccagaaatcctgctggtggtgtggtgtaggtcaaaggagcatgcccaggtggaacacagatcagtgcctaacagattgaaacatttaacaatgcaggcttggtttgttttttaaaaagggagccatgagatgggatgataattacacatcatagaaaaaaggccatttgttgccacttccttcctccaacagcatattaagtaatgggtgagaaactctagaactgggtaggtcatgtggacttaggactcaggaagagcaaaggcttcctctgtcctctgtgaaggccatgccaaaactatgtagtgagtaggtacttaagaaacagcagtgggaccaacccacagcctcctgttgcctggaggaattgccataccttcggccaattgcctatacttttgatctaggaaaatgaataatctagatcagcactggccaatatggaagccattagccacattaggctattgagcacttgaaatgtggctattcaggtactatagtgtaaaatgcataaccagtattgaaaacttactatgaataaaagaatataaaagctctcattaatattttaaaatataaatttatgtcaatctgtgaggacattttggatctattaggttaaatgaaatatattacaaaaattaatttcaccatttaaaattattatcatatggttactaaaaatgtagaattaaatataccggtcccattatatttctattggacaactcagggattaatctcatggattaactatacccctatggactgagtatctactgttggttgtggcaaggtgttggtgagacccactctcacccactgggagggcacattcttgtggaaataagcttctctgtattatccagactgcgtcttaccacgtgtattcaacctcctgtctataacacaccccaccagacacacacacgtgctgggaaaatgaacgctcctcctcagtggtgtgttagtcacatggaatgctagtcccagtgtgtgttggccacgtggcatgctagtcacatggggagccagtcaggtggggacaggtcacgtgtaagacccagggttaggtctggataacccaaggcctgtcccttgtctgcacaaagccttgggctctgctccaggctcagggcagcctctgtcctggtgttgtgcaggatgccaccactcttcagaccaggaaaggaagaaaactcccttcacccgggctctaccagccatcaggttgggcatccatggaaatagtcaaagcctacatgtggagtcctttgtcatccacaacacaaacaggcctctgctgctggtttatttatctaaggattgcagcaagattttttacccttccctccgaaagtcatgaggccttagcatggagaagccagtgcctggatggtttgtggaggttgaaggtggaaaagccaggcttaacaaataaacaatgaaaaatggggctgggggtaggctggggagagggaaagcgataagactcagcctttcaggagaaaagaaaaacgccctcattgattgtcttgacaacaaaaactgtaggcagcttctgcaggaaattttttttaaacaatatctctagattttagggagcaggtgctgaggcttaactgtcctgggaaccccaagttccaactggaatgctgtgtgtttcctgtaaatgactttgattactcaattggcctagtatagaagcccagctttcagaaagtgaaggtgctgtagtgaagtcttctgtaggaggcctgtttacataatccgtggccctccatgatgttggagaatcctgaaggatgttggagaatactaacccagtcctagtctgggttaggagtgtggcttgtaggtctgaaaataatcttattttgtaaacccctggaacagcctttcactcttatgcagaagctaagaaagttctgtctcaggggattttctccttttaagtacttgtggttttattggcaatacctggaaatgtgaaaatactctggtaccaaaacagcccttgaaattgtagcacacagctctggtctccagtgtgtggtcccaagcctaccttggtttaattgtggagttaacccgggagagaaatatcatcctgccatgtggcatgtactgaaaagagccccttttgctgtggacatgaggagatctctgcatttatcagctgagaggcctcaggccacatacttatactcttgtagcttgtttctctgtgtataacccatgaaagttgccagagttaaatgagattgccagcatgcaggctcctgtggaaactgtggagcattgtagaaggtcagttattacattattatgcccattctctctcctgtaggagctcatgttttccctgttccctctcccagtagcgggccttgctcaaagtgcaacccccagccatggctcatcccctatagaacaccagctaaatgcctcctggtgccagaaggaagttctcatgtaatagatacttcctggtgtcacagaacaaggattctgtcctctttgtcaaccagtcccttaaccgactcatctataaaagaagggcctaacttatttacgtatgacctttgtttccctagtcccaagcccctctgacctccaattctaaagtgagctctaacagatgatcaaaacagggaggtattttaggaaatatgcccacttctcatagtactttttccccctttggctcatttgtgctactctgtccagttagcagaaacaaacaaataaacaaaaataacccaactacattcctcttcaggtttcagttttaaaggaggaacccttgaggatattggaaacagaactacttaaggtattctcatgctttgtttcatcactccgttcctatttcttcttacattgccacctttaagcaacttcctctaggaaagggaccaacaaaattaaaataagtaagaggaaaacaaaaagattaaatggtaaacttaatgaaggcggaggctgtgtcttgttcatagggatatccctagtgtctagcaactcatgaaaggtactacctaaatatttgatgggccaggcccagtagctcatgcctgtaatcccagcactctgggatgacaaagcaggagaattgcttaagcccaggagttcaagaccagagtgggatatatagtgaggccccattgctacaaaaaattttttaaacgtagccaggcatgggagcaccacacgtagcccgagctactcgggagactgaggtgtgagtattgcttgagtctgggaggtcgagactgcagtgagccatgattgtaacactgtactacgtgctggtgacagggcgagatactctctcaaattattttttttccatttaacaaaaataaatatttgatgattgaaaactctcaccaacacatgaacacaagcccatctgcactcataattaacaggagacaggtactcaacccatcatttgtcctttatttaaccaactcagtgtattactatgtgttctacccactgatagcagttataaggactcttttacatttcttattaactgaatggacttctaaggaatatttcctcttatcaaatggagtatatatctttctatttattatacactgtgcttgccacaacgcccagaggaagtctaaataactcaacaattatatttattataaacatcccagtaacattcttttctctatatgaaaatgaaatagtgcttttagtaccatttgctaccattttttttcctgattgaaaaaattcagaatcttcataaaatttcaggggatcacacacttacaaagcttagattaaggagagcaaagggccaagttgtggagcccttaaaagtggttaatggttttaataatttaatggttaagcagagaaggggaattcagagaaaaaaggcagtaatcagagaggcaagaggaaaaccaagagagtagtgttactgaaagcaagggagtcatttcagaaagtcatgggtggggactttcagttgagatggtctggtaagaccacattttgaagcgtcgcctgtgctccaaacacatagcagtgagagctaaaatgtgaaaagagaaaaactaaaaatattcagccatgtccaaaagcaaggaaaatatctctttagacgaggagtggaccagaaaatgaatgttaagtagggatgaaactcctgccaggtccaggagttgagtttctttgcagatggggaacaaagtggtctcataaatggagggaggctgacttggataactgctgaaattaggatgtgggagagggtaaggaagcaaagggagtaaacccagcctggccaggatattggctccatgactgggtcagttctgattcattttttatcttcatgatatgtcacatattcctgcctgtttgcatgcctggtaacttttggctggatgccagacaccatgaattttgccctttgggtactgggaattttttgtattccaccaaatattattgatctttgttctcagatgcagttgagttacttggaaataatgatttctttgggtctttaagatgtgtagaaggaaccagagcagtgttccttctagagctaattgtcccccattgctgaggcaagactcttataagcactcaacctaatgcactgggaacatgaaattttccagtctggctagaacagatattattcctggctctgtgtgagtagctggctgtgttccctttcatcctttttggtggttcttccttcagcctctggtagtttcctcacatgctcgtgatgattggctgaatactccaagggcaccctctgcagatccccaggttctttctctgtgcacctctcttccctctgctaccctgccgggtgaattctagctactttggtctgcccagcctctcaggtctgtcttctcaactcagggagtgtgtttggctctcctgggtccccttgtcctgctccacagcgtggaaactctgtcacggcaccggctgggacagttgtagggcttcctttgtttgtttcccatctctcagggttcattgtccttcattacctcctgtagaatgttttaagaaccatggtttgatacattttgtctgttttagggaagtttcaggtagaaagttaagtcttatccctgttacgcaatcttagccccaggtggaagcctttggaatggcacctttataggaaacgtattttattttatttttgttttgtttttaagagtgatacctgcttgagcatgcttgtattttgagaggaagatactggagaaaagaaagagattaaagatattaaaaatatggggaggggattaaagatattaacatatgggaaaaatatattaaaaatatggaaatagtgatggagcaaatcccacaggaaatggaggctgatgagttagccttgaagaagaggatgtacatatctttttgcctgaaatactgtaggatgtctctgtagatcagtagagatttgtaatgggaagttaaagaagttagtccctgatggtctctgttttctcagtggaatatgaattaaagttgtctacatagaataggtgggtagacatgagttactagaatcaacagaaatgggaaatgtggggaataaccattctggagaatataaaaagagtctaagtaggggtaaggaaatgtatttcaaaacagtgttaagggctttgatgacattgactgatgagcacttatacccattaacaaatgtgaagttatctagcacagtgattcacatggagtggttttcagctagaaatagctgaatcttaacaaattaacctgtttatattttcaatagcaagaacttgcaagaatgaactatttatgggaccattaagttttgatgaggtagagatgcaatttaggaacttggagttcaggggaaatactcttggagatttagatgaagattctacagttggggacccatggtatgcaggagggaggcaaaatgaagccatacttttaactctttggggtaggtggagagggaaggatttgcaaagttgcagtatcactatattgcagaaatgttgggggtgccactgacagaatataatatggagtgatctatatatttctcagatctttcagttgtgcgttatctatgtaaaatggacttaacgacaaaatacatgaatgcatgcatacacacagacatacatgcaaactatttttcaaaacttaggctctctggagatattagcagatttctttcaacatattccataggcatttggaacacagcaaatttagggtattttaaatcaataataaacttatgatttcttcatttttgctatagggaactcattaacatgtagtttaacagggagaaaaagcagagtatgtcagattgcacccccatacccttatattctcattttaaacattaatatcccccatattttacagataaagatattggagttaagagagatgaagttccttgctgaagaatacaaagataattgaagaggaactcagatgtctagaatgagagtctagtgctcttgttgctatatcatgtccattatggttaattttatgtctcaccttggctaggccattgtacccagatagttgcacaaacagtattctagatttttctgtggagtttttttttttttttgtatgagatataaatttaaatcactagacttggagtaaagaagattgcctgccgtaatatgagtgggtctcatccaatcagatgaaggccgtaatagaaaatgactcaccttctaggaagaagagggcattttgccagcagactgctttcagactagaacgcagctcttctctggtctccatcctgccaggctaccctccagagtttagacttgccatcttccacaatcgtgtgagccaattccttaaaataagtctctctctgtcctctcctctctgacacacacacacacacacacacaccccttattcattgtgtttctctagagtatccttactaatacaatgttcttggacaatgcatgtgaaatactagagaatttaataagcaggctaagctacaatgccaggcactctgtgcttaactccagagtatttaaagtgatagtaaatcttctagttcttgatatttagcattcgttttagaagtcatagaaaaataagcttgaccagggaggaaaatgttacaagtaacttttatacttacttgtgacacaaaacacattaactttttatatttaattctaatgtttatactacttggttgaaaaatactaattttaattatagtatttttgctttgataatcattgaacctttcttttaattgaaatataattctcataccacaaagttcatactttaaagatgtgcagttaagtgatttctaagtatattcaaaaaggttgtgcaaccatcaccactctgtaattcctaaacatttgtatcatccccaaacaaaaccccataaccattagcagtcatttcccgtttctccctcttccagatcccctggcaaccactagtttatctgtctttgtagattcatctgttctggacatactacatatataataatattccattgaaaaactttctatataataagccacagacttttaatgccttgtttcttttactaagcataatgttttttaaggttcattcatattttagcttgcttttgtatttcaattttatgtgactgaattaatatttcattatatataattatatataacatacatataatgatatatatatatacacacaccaaattgtaattatttatttatcaatttatgggcacctgggatatgtccaatctttggctattatgaataatgctgctatgaatattcatgtacaagtttattgtgaacatatgttttcaactgtcttgggtatatacctaatagtggaaatgctgggtcgtatagtaactctatggttaactatttgataatctatcagactattttccaaagtggctataccattttacattctcagcagcaatgtagtctctccacatccttaccaatacttgttattgttctttgttttgattataatcatcgtactgggtgtgaaagttatatcttatagtggttttgatttgcatttccctaacagctaatgaagttcagcatctttcaatgtacttgttgtatatttatctatcttctttgcagaaaagtctatttagatatttttcatttttaaattaaattttttgtcctgttgttgttgagttataaatgtcatttattatttgttgaatgtttcctccaaattgtatatgtcacaaacttaatccacaatgtggcagtattgaaagggcctttaagaggtaattggatcttgaaagcacagctttcatgaatggattaatctattcatggattaatagatgaatgggataatgggttaatgggcatggaactggtggctttgtaagaagaggaagagagacctgagcaaggttcagccccatcactatgtgattccaggcctcaagattcttcagagttcccattagcaagaaggctctcaccagatgtggccccttgactctggacatctcagccttcataactataagaaataaattccttttcttcacaaattacccagtttcaggtattctgtaatgagcagcagaaaatgcactaaaatactccctcagtttttgttaatataaggatgtcttaatttcttacttaattttgaaggatagtgtgctgaaataggattattggttgaaaatttttttctctcagcactttgaatatattgccccactgccttctggcctttaaagtttctgatgggaaatatgcaggtggttttattgaggatcctttgtaaatgatgagatccttctgtcttgctgctttcaggattctctcgtctttctctcaaaagttgtattattatgtgtcttggtgtggatctcttttagttcatcttacttggagtttgttgagttttttagatgtttgtattcatttatttcatcccatatgggaacttttcagccattatttctataaatattctctctttcccattctccattctccttatagaaatcccagaatacatgtattctgtttgatgttgtcccccagatcccttaggctctgctcacttttctttaagcattcttttttctttttctttttaagagacagtttcactccgcctcctaggctggagtgctgtggcatgattataccttacaacagcctcaaactcctgggatcaagcagttctcccacttcagcctccctagtagctaggactacaggcatgtgccaccatgttcagctaatttttaaaattatctatagaggtagggtctcactaagctgctcaggctgatctcaaactcctgatctcaagggctcttcctgttttgaagtgctgggattacagacatgagccactgtgccctgtttaaactttttttcttttgttcctcagatgaagttgatttccattgtcctatcttcactgatttttttttctgcctgctcaaatctgcctttgaatccctctagtgaattttttttttttactttagttattataccttttagctccagaatttctctttgttttctttttaggttttctatctcattgttggtattgcgatttccccataagaaatgtattacttgtattacttaggttttttgtttgccatgttttcattttcttccataaaggtattttctaattttctttgtgatttctttactgacccatgggtttttaaatgattgtgttgtttaatttccataaatttgtgaattccccaaatgtatttctcttactggataagtattttgtattatttcagtccttttaaatttactgagatttgttttatggcctagaatagggcctatcctagggaatgttctgtgtatacttgagaaaaatgtatatcctactgctgtggggtagagtgttcctccaatgcctgaaaggtctgcttaatttatggcttccactgtgattgtaagctgtcagttttcaaggctactatggagctggaagagaagaagggaatgggagtaggacaagttaaaacacagcaaagcttactgttcttactgatattcagctgtttttcttcaaaaaaaaaatacccagattgctgcagaactttggctaatttctagcattctgaaaatgttgattctgataattttgtgagttttctcattgctttcatggggaagattattttcgcaagtctgtcatttttgcggacatcaccttgtcttccactgaatcttgatgtatattttatatatcatgaggtccaattaaaagagcagtaaattaagtaccagttctctacgtgtaggaaggagaatgttaagaagtttcacatatgttaagaagctccatatttagtcttttctgaagtttccaattttcactggcacaagaatgaggcagagcagaggaaccactgggattcagcaagattagcttcacattgcttgtctaccacattctcctatgtaaaccacactcctgtgcatttatattcttgtctctccatcttcctcaatagcttgtttctgactagtctttccatgacagaggctgagtcattcccttgagagaatctggcctaagaacagctgtgtctgaaaggctttccttctgtatgcaaaaggaaaagctaattagagggaggggtgggtttaactgtttgtatctaggatgatgacaggttgatatcttctaatccttttgtaaaacagtttttagatcaataaaaataaatagaatgtatttagtttctttattcttatccttttagtactttcacataaaaaacacaagcctcccactacgaccaagtagaagtagtcaattagcatatattctgtcaatgaattctgtgatgaacccagttaatttaactctttaagcaaggacatagtgagtacctagtatggactaggcatatgattaaatttctgctgccattctcccagaatttcagaactctcccattcctcctatatcctgcttgtgaaccgactatagaattagctttatttttactgtcccttacttcattcataaacacaggacaaagtgatccagatgtcatacaaaaatcaatattgtttctctctccccttctttcaaactctcactctctttttctctctttcacacacagtgaaatgaaaaaactacctaaaaataagaaatgttaggtgaagatagtttttttttagctcacaccacttcctagtcttagatagggcaactagagaatggccatctgttatttctttctcttcttcattggccttgctcaccatacagagacatgttccaacactactttgagatattaagattgtggggaaattttccttttgaaagagtttacctctatatcaaatatgtgcaagatataattttcaaaattattttatcaatttactttgtagagttcagaatatcctggtttagtattggattgccaagattgatatccaaggtttgcctatttacttatttcatctttgtatataagccaaaatattctatatgcagcttgatactcccagttatgtgggggagggtgggaacactgacagctgcccagaactgctgcaggggtggacgactggatgcaggtgcacagactatctcaatttgacaggctttaaggcttacattatctctagtgatatccaatatcctgtacaatgaggtccataaaaacaacagaagcaacacagttatacatattcaccagagcatataccaccacaatatttactcagagctacacaaagataatgtgtaatttttgtgatcattaagtttacagtgtcacagcaggttagaaattaaatcatgcatctgacattacgatactttgttaactgcggttttcttttttgtctatactctgtatactacataaagattagaagtcttaagttttcacaacaatttcttgccagaggagtgcaaataagtgctggaggaattatttctctggttatattttgaagctgtagaatgttagtgtgtctctcattttgagattctattctcagtgtatgctgatctagtcctgttctgcaactaactagatcatggacaagtctcttgacctctgtatctctatttccttgaatttaattgaattagtatttcctgccctggaagttatcacaaggtggttttgagaatgaagtgataagaatgcatgtgaaagtaatttggaaatgactattagaggtagataagagtgaaaacttacctctcctccttgctaggttctaacctacagagagaagtactagtcaaatgggggctcaaattatcatctttttaggcaaagaagtagtcaatagaattcagggatccgagaaaagtagattagagaatgtgacttagatctaagtccaaaagtaggtccccttccccctagtccagagaaaaacctctgtattttcaaagtaagtcaagggttctgtgcagccttccagtccacctatggcaagttcaaggactgcttctgaaaggcaggaggaactggaatgcagagagaacagcatacctccccactgagctgagcaagccctcccaaggtgggttagtactcagagacatgaaatgcaaaggtgtgcaccagggaaggagagggatcttactgcatgagcacaagaccatcaaaaagaattatattttgtgctaccagtgagcagtaccctgtaatcccatcaagtagggaaataggctctagtggaagtgaagctcttaccaaacagattagcacctccctttcttgtgaggaggaacaagcagaagaaagagactggagtgatgacttcattgctttctggaagagattgggagcttccccctctatgtatgaatgtgtgaagaagagcaagagtcctcctcccacacaaccattggaatgaggtatgcaaataagtatgcaaatagggtttgctttatagggtttgtctcagtgaaaagtccaaagaaattggttatagaaggtgccttaaaggtcacttaaatattcccctcattttatagtaagaaggggccaagggcaggttggtcactagctcagaaattgactaattctcagaaagaggaattggttcagaaaatagaacccacaccaggtgggtaggactttggtgggggccctgggctgccagaaagcagcataagaacactgggtcctctggggacccaagggagtttgctcttaaacaggggaggggagagcagaatggatgtagaggagaggaagattataaatttgtttaatgtaatttcctataaatattaaattacaccactgatttagataatcaagataatatcaggtcataagcatggtttatgttgtataaataaggaatatgtatttctttcttcctcccctttgaaggcttgttttcttctttgtagcatttaccctccacttattacgatgggaacagtactaggcttccatctgggagcagccactctcattccacgtggcaaaagtggggctggccctctcccaaggctgttgggaagtctgctgactaagacctggccattcagaacacttcatttctctgaccacaggaactggtttagggaaggtcatgtgatccaacccaagaaaaggacacccttttactggtcctcttggaaatgaaaattccttttgctgaagagtttatagctgagatgctgtgatataaacttagagctgaagttggccatcttgccacagtgaggagggagttgagttgagaataaggctggcccagagtaaagcaaagctgaacgatggaaagaacgttatttcttgtgatgtttttgagcatcttaatcaggcttgtgcaaagtcagcatcccactacaattttcagttacatcagccttacaattctatactctcctctgattttgtttacagctgtttaaataatatttccgtaagtcaaattcaaaataaccttgactctttctctttagaaactctcaaacatgttacctgtgagtaacatttcccttttctcctctatttctgctttttattcacctaaatatattctaacctgaataataaagcagaaatttatatccatttatcaaagattaggaggaacaagtaaaagaagagaaactagagtgatgacttcactactttccagagcaaggaagacattgaaagcttctccaagtaggctgttctatttttcaccattttttttttttttttgcccaagaccctttttaagctcatagtgtagaaatatcgcagtaggaagatattttgcagttatttattgctgtgttactactctgtaacttcgtggcttacagcagcaatcattctgtcatatataatcatgttgtctgtcatgactttgaccaggaaccagctggatagcttttcttttccacatggccccaactggggtcacctggagacattcacctgattactggccttgtctggacagtctaaaatggcttatgcatggcctcttggaggggatggctggaaggctgggttgcaccggggccacttcccatttagtctcagagcttcttcacatgttctttcttggtggatcagggcttcatgagtgagtattgcacgacgtcttaaatgtaagctgtaagacttcttgttatctagactcagaagtcccaggatgtcatatatacctcatactatcagtcaagcaagttactaatgccaatccagagtcaaagggtaaaagaattagacagttcaactccatctttcaatgagaggagcagcaagcaagatttgcagccatctttaatctacccctaggtgatatagtacagttgaaagaggctgaactctggggttagacaaacctgtctaagaagggcttcattactcctcgctgtgatttcttagcctcaatttgtaaaatagggggcaataaaacctctctcataaagttttgagaatcaagtgaaataatttgtgttaagtgccctaggatagtgcctggcacatagcagtcactcagtaaattatagtttgatctctttagagagattcaccttttgaatacagcatataagttccctttctatcaagagtagagtccctctcaattgtaatatgttattaaatgtgctgagattttgtatccatctgttaattctcactgtgtggaggcattttgggtggtcaaaagctattaatgaattctagctgccttttcttggttccagagataacattattgctgttaataattttcagactgttgcagatagtatgaatctgtctggggatggagtcatttgttttgtaaagaaatagtttcatcaaaagttaataaattcagcatctttctgcaagactgctgttttctttcagcatggggattttgcagttcactattgcttttgccacagactaggcacatcagagctgggtacatttcaaccatgggctctcactgaagagtgagaagatccagttgagtgctcaacaatgcatctgtgttgaaatctcatcaattacatctggaatccttagtcagcctcagaattttcttggtattgacatctgttcaaagaggttgttctatatttgtaaagtcccttcctcttgagccacaacccaccccctccctttatgtcattctaataataataaattggcagtacatgctggctatttgggatggaaataaattttatgtttctagcataatgggaaaaaagaagagacatacataatactcatacttggaattactaggctctggaaaccattattgctatatccacagccaagtctgtgggtttacacttggcatatgaattcctaagtgttactgctgaaagttatgttcagggggtgttaataaattatgagttttctgtagtgtaaggcttaatgttttgttcagtgttttgcataaaattgctgaaaagtatcatgattagtatatgggtcttgtcatcatttttcagttgtttgaaaaacttagtgccttttaaatgttcccacttaaagttttgtaaaatagtcatccttttattctctttgcttgttccttaagatatttgtgtttctacttctttaagtcatctcatgttgcaatattgaggcaatctggaatgtgggtttccaaactgtgccttgagcagccagccagctgggagccctgcacagatatcatgcttcactgctgtgggaaaactgaaacccttctcaacactaatgacctctatggttcataaattcaaagaaaagagatagaaattctaattgtagctattgaaatctcactttctattcttttaaagatgtttcaactcaagtgtttagatgaaacaagagaaaggatgataaattattattttaaaaattgatggtagcaccagttagatccataacagattaaacaaggtattacatatatcatctatcttacttcaaaatttaatcttaatttaggtaagaatatagctttaagaaggcatattttggatgggaaataacattcatttgcctactgatatgtccacataatatttctgataatgcatgtatcagactaaatttctaggaaggaaaaaaaacagattgaattttacctcatgaaatgcctcacagtacctgtcaagccatctgaactgtgtttactccattgatttatagatatagtaagacctcttctcttacatggaaatgttcatgaaataataattgtacagtgctttaaatcgcttcaaaatatacacattgctccccaaattcaaatatatgtactaattaagtctcatataatacatacgataatttcccttcataattacttcaaagcaacacaatttttgaatatatatgagtcctattaactgaaatatttccctcacttccactttatcaactttctaactttccatttattttctctgtttggatacatttcatcacacagacataataagtagttacacactaatggaaaaacagtcacattgaaccaaataaagcaagtgaaggaaagaattagctaagaaaatttgtggtgttttatgggtgagatggcgtatacaatatctaacatcgtgcctcacattatcataactcacagccttcttgctttcttaatgagtgacaatagcaaatctggaaaacatctgccttgaaaaagaacactaagtgctctcaacttaaaaaaaaatgtttttcggctattactctatataagccatgcgtatcatattgtggtatgagatgtcttagttgcaagaaatcaatattctcatgtttgatttcaaattgtatagaacaggatcccagcataattcaagtcattgtgaagccacagttggaaaaaaagaacatgatttactattagcaaatcttcaacagtgctgcccaatttcccacaatgattatgatttggtgaaggaagtttagcaagctattgcatttttttgtgcaatctaaaaagaaaatatgcaacataaaaagaaaaactgcatgaattgcatgaacaaaatatgcactcatgggcatagctgaccttttcaattggcagacatgttttggctacacaattcaatatatattccttaaatctcattaccactgcaatggcagctgtagttacaataagtttatcaacattcctgcctgtgtttctatcatgaacaagtatagtctcctttttccctcactatcaatagataagtgtttgtaagatgaaagcatgacacttctagaagaaggaagaagaacaaattccagtatcaacttatgcattgcattgatctaccgaatttttccaagtgggtctgaaagttaaaaatagctgttcatttttatttctccttaaagtgggaggtgagatcacagtagagaaactgcttttcacttcaaatacatgctgtcattgtattagtactatttttaatttctaaactgttacaaaaacatggggtttggcaaactgttaataatttatttcctggattgtaagatgaatttgatcatggaaaagaatttgtttctggtctatctcagatatttgtcatcatctttttgttttttattttctcattgcagtcgtgatgcattattataacaaagtgtgaaaattttcattcaagagtgactttatccaagacattatctcatagaacagctggtatccttgtttggattgaccctgaaccatagaaaagttcgcctttgttataatgagagcagcatctgaattatttattttagccatttagttcttcatctattgttatgtttgataaaataattcacataagctgacgatagagtttttccatataccgggtattaaattacacattcagtttaacctcaaatgctctttaactatccaaaatgctttgaaatcatgctggtcataattttatttacatatctttttttagataattctgtttagctcaaagcataaatagatttaaaattttaatcttattagttccagaagataatcctaggggtgtataaagaagactgagccaagtttaatggtagcttttgaatattttagactgaacagaatcatatactgtttacagttgcagtttgcatgcaggtgcattgtgggaaagtaacccatcagtgaaagtcacacgtgttctttggttcaagttttttagtcacatagtaagaaattaacaatgctgtatttgttttctttttaatatttctcatatttcttactctcattctgtaggaatgcattctaatccaaggacacattctcatacattcattaatccttgtgctccaaaatgattcacatgaaaactcaaaatcagatggtttcatgtgttccaacttagcttttgctaaaacaggcgtcatccttggacttgtcatctgctgaggtattgaattccctatttcactcaattacatgatcttaagaatgtggccatttgccatatctgtctcaactttgaacacatgtttttgcatctaactattcagcttcaggaatccctcaataataaatgacctgcaggaggaaagagtaaatcatttaaagagctacctaaataatacattaaaatattgtttatgtttaacaataaagcattataatacaatcttcctgctaagaacaagttttaactctctaaagcatgctactgcagtatctgagttacaaattaattgtttaaatagcagatttttttataagaagaatttttatttctttaagttttaatcagggtgatatttttatagaaaatagttgtcatattctaatttaaaacaggatcctgatgtggaatattataattgcataaaatttattgccatgtgtatatattgtattacttagttttcttcttaaaatgaagtatacaatatgtttgtttcagatatttataattaaatgataaaatcaaattaaacacatccttgtctcctctgataaacttaaaagtgactgagggcacagaatgtgtcctattcattcctcagatgcagaaatgactaggacagggtttggcatatagtacatgctcattaagtgttactgaattgatttgaatattttgtcagatgtaaaatatctattttatttgtgatcatacaactttagactaaaggataaaatgtaagactttaagattgtaccaggtgtgtgcggtggctcacgcctgtaatcccagcactttgggaggtcaaggtgggtggatcacctgaggtctgaagttcgagaccagcctgaccaatatggtgaaaccccttttttactaaaaatatgaaattagctgggtgtggtggcatgtgcctgtggtcccagctacttcggaggctaaggcaggagagtcaattgaaccccagaggtggaggttgccatgagccgagatcatgccactccactccggcctgggtgacagagtgagactctctcaaaataaaaaaaaaaaaaaattgtaggccctttaacccctttacatttattcactcctttatgagaaatattatgtaggatgggtcaaattgcctctttgtagaaaaagatttctgatttcagcttggagattaagagagctggaactaccattcctccaacctaaaaacaagaaaaacaaaagctgtcaggttagaaattaatcaattttcttgaacccatgagataactgagcttgcacggtaaaacctaccctgaaatctgggaagagacaagtgtctgccaataagttgccaattcgaataatctagtaagaagatcagctagaaatatttaatgaactgctaaaacctgagtataattgtgaagtctctgggggctgggtgtgtgtgtggggggtcacatcatcttgcaggatattcctgtacaactcaatcaggcattcatgaggaagactgggaagaagcctaagaaaacttgccctgtgacactggctggagcaggggatctagaagccatagcagtaatactgccagactcatctgtatcatctcaaaggaaaaaaagccttactgtgcagggagaagtgaacaaaactgtagactgaggactctggggaaaggggagaagacgtgcttgtcctagtattgcctctggcgaaggagcagggatgtttgttaatgtcacagccccaagactgaggttctcaatgcccatctaaagctgaggcctaataaggatatcagagaatacctcctccccttacccccctgacctccatcatcctaccaagtgtcagataaaattaagagtggaatacggctgggataactgcaagagaccaattctctattgcataaaggaaaaacttaagccaaatggggagacccaaaaccaacaaggaagtgatctttaaacccagccttacttctgattagattaacatgaacccctacactacaggcctaacagaaggaaaagtgtgctcttctctaagaataaacaaatttttgccttagtcagatcaggctgctaaaacaaaataccatagactggatggcttaaataacagatattgatttctcacagttctggaggctggaagtctgggatcagggtgccagcatagttggattctcattgagggtctttccagcttgtggatgggtctcttcttcctgtatcctcacatggtggggcagggggagtggagaggagagagagagggagagagagagatatggtatcttctaagggcactaatctcatcacgagtactctactctcatgtcttcctttaaacctaattacctcccaaagttccacctcctaatactatcacattgtgggttagagtttcaaaatatgaattttgggggagtacatagtacataacaatatgtatatcaatatctgtcaccttgcatatgtccaaccatcaacaaaagctttatgaagcatacaaaaaggcaaaaaagtagtctaacttgataaaggagtcaacagagccagacaaagacattacatagatgttcgaacaatcagatggggaatttaaaacaactatagttaccatgttaaagtaatttttaaaaatttacttttcttttaaaatattttattaattacataacataataggggtaacatgagtaaaagcataaacatacaaattgcaaagatatattttggtgtcataattttatataatgcaataaataagaatactctttaatgtggtaccttgattgatcataaagttttcctggctcatttttctgcaaaatcacatccacagttcattttctgcaaaagtcaaaaaggtcatcaaaatttttacctttaggaacttcattttcaatcaagatacttgaagagacatcagactttttttctaattgcgaatcctgctgtaccttaaagaaacttgatatataatatttgtacatatttatggggtacatgtgatgctttgttacatgcgtagaatgtttcatggtcaagtcagggtattttggatatccatcactttgagcatgtattatttgttgggaacactttaagtcctctcttttagtgattttgaaatatgcaatacatcgttgttaactgtagtcactatactctgctatcaaacattagaacttgttccttccaactgtatgtttgtacccattaaccaacctttcttcatgcccttccccaaaccccatctgcacatttcccagcctctggtgctatcattctactctctgcctttatgagatgatattcatctttctgtgcctcacttatttcacaatgacctctagctctatccatatttttgcaaatgacagtatttcattatgtttcattatgttttatggctcagtaatagttgtgtatatataccacattttctttatccttttacctgttgatggacacttaggttgattccatatctttgctattgtgcatagtgctgcagtaaatgggggtacaggtattcctttaatatactgatttttttttttttttttgagacggagtctcactctgttgcccaggctggagtgcagtggcgcgatctcggctcactgcaacctccacctcccggggtcacgccattctcctccctcagcctccggagtagctggggactacaggcgcccgccaccatgcctggctaattttttgcattttttttttttagtagagatggggtttcaccgtgttagccaggatggtctcaatctcctgaccttgtgatccgcctgcctcggcctccaaaagtgctgggattacaggcatgagccaccttgcctggtccactgattttcttttctttggataaatatgaaagaaaaggatattagtgtggattgctggatcgtatgatagttctgtttttaattttttgagaaatctccatactgttttccatactggctatactaatttacattcctaccaacagcgtataagaattcccctttctccacctccctgtccacatctgttattttttgtctttttggtaatagccattctaactggggagagataatatcttactgtggttttgatctgcatttccctgatgattagtgatgtggagcatttttttatatgcctgttggccagttagttgtatgtcttcgtttgagaaatgtctaataagatcctttgcccagttattaagggatttttttttttttcagctgagttgtttaagttccttgtatattctgtatattagtcctttattggttgaatagtttaaaaatattttctcccactctacaagttgtcttttcattctgttgatttttatttatttatttattttttgctgtgcaaaagctttttagttcaatttgtctgtttgtctattttttgttttgttgcctgtgctcatagcaaaaactttgaaccataaagtctttgcctagatcaaggtcttggcaagtgtttttcctatgttttcttctagtagttttataattttgggtattatgtttaagcctttagtccatcttgagttgatgtttttatatgatgagagataggaatccagttttattcttatgcatttggataagaacaatttattgaagtttatgttcttttcccaatgtatgttcttggtggctttgtcaaaaattggttggctataaatatgtggattaatttctagattctttattcttttccattagaatgtgtctgattctatactaatgttatgctgttttgattactataaccttgtaatataatttgaaggcaggtaatgtgatgcccccagctttattctttttgttttacgttgctttggctattgaggctcttttttttgattctatgcaaattcgaggattgttttttcctatttctgtgaaaaatgtcattgatattttgatagggattgaattgaatctgtagattgctttgtgtagtatgatcattttaacagtattaattcttccaatccatgcgtatgggatgtctgtcaatctttctgtgtaatcttcaattttttccatcaatgctttatagttttccttatagaagtctttcacctactcgattaactttattcctaagtattttttgttgttgttcttattgtaaatgggattaccttcttgatttctttttcattgttgtatggaaatactaccgatttttgtactcttcaacttcactgaatttgtttatcagatctaagcatttttttggtggagtctttaggttttgtaaatataagatcacattatctgcatacaaggctaacttcatttcatcttttctaattcggatgcctttaattctttctttggcctggctcctctgggtaggacttaacagtattatgttgaataggagtgatgaaattgggcttccttgtctcattgcagttcatagaggaaaggctttctgcttttcctcacttagtatgatatttgctgtgggttttgtcatatatggcctttgttatgttgaggtatgttccttctatgcctcatttgttggatttttattacgaaggttgaatttcatcaaatgctttttctgatctgttgagatgtgatatactttttgtccttcatttagttgatgtgatgtatcatgtttattgatttgcatatattaaactatccttgtattcctggaataaaacccacttgattatggtgtatcaactttttgatgtgctctcagttatggtttgctagtattttgtcaaggatttttatgtccatgttcagcagggatattaacctgtagttttcttttttccttgtgtccttgtctggttctggtattagagtaatactggccttatagaatgagctagagagaattccctcctcttcaattttttagaataatttgaggagaattggtgttagttttttataagttttgtagaattcaacagtgaaaccaagtagtcctctgggatgtactttttcttagaaatttttataattgattcaattttgctattcattattgacttgtttgggttttctatttcttcctgattcagcattggtacattgcatgtgtctaggaatttatccacttcctccaggttttctagtttttatagcatatagttgtttataatagtttctgatgatcttttctatttatgtgatatcagttgtaatgtctctcatttctgatttcatttggttttctccctttttttcttgattagtctagctggtgatttattgaatttgtctatcttttcaaaaaacaacttttcgttttatagattctttgcaatttttggaaatatatttctttagctctccaatgatcttttttatttctttccttctaattttgggtttggtttgttttggattttttccagctttttgagacacattgttaggttgtttattggaaatatttttagttttcaatgtagacgtttattgctataaacttttctgttagcactgcttttgctaattgcataggtttgtgtttgttgtgttaacaattttaatttgtttcaagtttttctatttcttcttaatttcttcattgacccagtgactgttgtttaatttctcggtattcgtacaggttccaaagtttctcttgtattgatttctagttttattccattgtgatctaaaagcattttattccattgtgatctaaaaacattgtcgagactggttttgtgtttaaacatatgctctatcttggagaatattctatttgctgatgagaagaatgtgtattttgctgttggataaaatgttttgtaaatttctgttaggtttgtttgggggtgtaaagtgcagtttaaatctaatgtttctgcattgattttctgtgtagatggtctatctaatgctgaagtggggtgttaaagtgcccaactattttgttggagtctatctctccttttaggtctaataatatttagatatttaagtgcttcagtgttgagtacatatatatttagaattgttatatcttcctgctaaactgaagccttaatccttatatagtgcccttctttgtctcatttaactgtttttgacttaaattctgttttatgtgatgtaagtagagctactcctactcactttttgtttccatttgtatggaatatcttgtctcattcctttccttttggtctgtgtatgtatttacaggtgaggtgagtttgttgtaagcagcaaatagttgggtcattttaaaaaatccattcagatagtctgtatcttttttaatggtcagtacagatgtaatttttatttttttcaaatatttttgattcatagttggtagaatccacagatatggaacctacagataggaggacagactgtagataatataaactttagtatccaaaccagacaagaaacagtgtagaaaatatggagctacctcatttatgcatatagatgttagaatcccatcattagtacatatctgaatgtatgaatttcataagcataagtgaaaagctaactcagaaattttatacaacatgatataatttttgaaggcttaaaacacaaaagtaaacattttgcttggaaatgcatgcattcattcatgaaaacatttagaattatggacacctctcaggaagggagggaaatgcaatatttgaggacacatggcagagattcttttcttataccattctctgtctttagccggatagtgactgtttgaaattatttttttgtagcttcaaatacttttagagttagaaagaacctttgaaataagcctgttttctaaatttcactcatgaataaaccaggctcagaatttctaaattcattacatatggttgtacaaaattatccaagcttcttgctatttttttaaaattttattttaatttcaggggtatatgtacaagtttgttattttggtaatatgatttggctcttagtctccacccagatctcacatcgaattgtaatctccatgtattgaaggaaggttctggtgggaggtgattaaattatgggagcagacttcccccttgctgttcttgtgatggagttctcatgagatctagttgtttgaaagtgtgtagcacttccccccttctctctttcttccttctgcttccaccatgcaagttgtgtgggcttttacttcctcttctgtcataattgtaagtttcctgagacctccccagccatgcctcacgtacagccctcaaaactgtcaattaaacttcttttatttataatttacccagtctcaggtagttctttatagtagtgtgagaatggcctaatacaattggtaaactcatgtatggggctttgtttttacagaatattttgtcacccaactattaagcctagtatccattacttattttttctgatcctctcccttcttccaccctccatcctccagcacccatatctgttgttcaactgtacatgtccatgtgttctcattatttagttcccacatataagtgagaatatgcagtatctggttttctattcctgcattagtttgctaagaataatggcctactgctccatccatgttcctgtaaaggatacaatctcattcttgtgtatggctgtgtagtattccatggtgtatatgtaccacattttctttatctggtctattgttgatggatatttaagttgactccatgtctttgctattgtgaataatgctgcaataagcacacatacatgaatttttatgatagaataatttatattcctttgggtatgtaaccagtaacaagactgctggcttaaatagtagtttggtttttaggtctttgagaaatcaccacactgttttccacaacagttgaactaatttacacttacaccaacaacgtataagtgttcctttttttctgcaacctcaccagcacctgttagttttttactttttcacagtagccattctgactggtgtgagatgttatcttattgtggttttgatttgcatttctctaatgatcagtgatgttgaactttattttcataagcttgttggctgcatgtctgtcttcttttgaaaagtgtcacttcttgaagaggtccttcacatcccttgtaaattgtatttctaggtatcttattctctttgtagcaattgtgaatgggagttcactcatgatttggctctctgtctattattggtgtataggaatgctggtgatttttgcacactgattttgtatcctgagactttgctgaagttgcttatcagcttaaggagattttgggctgagacgatggggttttctaagtatacaatcacgccacctgcaaacagagacaatttggcttcctctcttcctatttgaatacgctttatttctttctcttgcctggttgccctggccagaacttccaatactatgctgaataggagtggtgagagaaggcatacttgtcttgtgcctgttttcaaagggaatacttccagcttttgcccattcagtatgatattggctgtgggtttgtcataaatagctcttattattttgagatatgttccattaatacttagtttattgagagatttagcatgaagggatgtggaattttattgaaggccttttctgcatctattgagataatcatgtggtttttgtcattgcttctgtttatgtgatggattatgtttattgatttgcgtatgttgaaccagtcttgcatcccaggggtgaagccgacttgatcgtagtggataagcttttgaggtgctgctggattcagtttgccagtattttattgaggagtttcacatcaatgttcatcagggatattggcctgaaattttctttttttgttgtgtctctgccaggttttggtatcaggatgatgctggccttataaaatgagttagggaggagtccctctttttctactgtttggaatagtttcagaaggaatggtagcagctcctctttgtacctctggtagaattcagctgtgaatctgtctggtcctgggctttttttggttggtaggctactaattactgcctcaattttagaactttttattggtctattcagggattctacttcttcctggtttagccttaggagggtgtatgtgtccaggaattcatccatttcttctagattttctagtttatttgcatagaggtgtttatagtatcctctgatggtagtttgtatttctgtgggatcagtagtgatatcccctttatcattttttattgtgtctatttgattcttctctcttttcttcctcatttgtctggctagtggtctatgtattttgttaatcttttcaaaaaaccagctcctgtcttcattgattttttgaaggttttttcttgtctctatctccttcagttcttctctgatcttagttatttcttgtctttggctagcttatgaatttgtttgctcttgcttctctagttcttctaattgtgatgttagggtgtcaattttagatctttctcactttctcctgtgggcatttagtgctataaatttccctctacacactgctttatctgtgtcccagaggtgctggcacattatgtctttgttctcattggtttcaaagaacttatttatttctgccttaattttgttatttactcattagctattcagcggcaggttgttcgtttccatgtagttttgcagttttgagtgagtttcttaatcctgagttctaatttgattgcactgtggtctgagagactgatttttatgatttctgttcttttgcattttctgaggagtgttttacttccaatcatttgggcaattttagaataagtgtgatgtggtgctgagaagaatgtatattctgttaatttggggtggagagttctgtagatgtctattaggtccgcttggtccagagctgaattcaagtcctgaatatcctcgttaattttctgtcttgttgatctaatattgacattggggtgttaaagtctccatctattattgcatgggagtctaaatctctttgtaggtctctaagaacttgctttatgaatgtgggtgctcctgtattgggtgcatatatatttaggagagttggctcttcatgttgcattgatccctttaccattatgtaatgccattctttgtcttttttgaactttgttggtttaaagtctgttttatcagagactaggattgcaacccatccttttttttcccttttcatttgcttggtaaatattcctccatccctttattttgagcctatgtgtgtctttgcactcatgagattggtctcctgaatacagcacaacaatgggtcttgactctttatccaatttgccagtctgtgtcatttaattggggcatttagcccctgtatatttaaggttaatattgtaatgtgtgaatttgatcctgttactatgatgctagctggttattttgcctgttagttgatgcagtttcttcatagtgtcaatggtctttacaatttggtatgtttttgcagtggctagcactggtttttcctttccatatttagtgcttccttcaggagctcttgtaaggcaggcctggtggtgacaaaatctctcagcatttgcttatctttaaaaaattttatttatccttcacttatgaagcttagtttggctggatatgaaattttgggttgaacatttttttctttaagaatgttgaatattgaccccccactctcttctggcttgtagggtttctgccaagagatccactgttagtcagatgggcttccctttgtgggtaacctgacctttctctctggctgcccttaacattttttccttcatttcaaccttgatgaatctgatgactatgtgtcttggggttgctcttctcaaggagtgtctgtgtggtgttctctgtgtttcctgaatttgaatgttggcctgtcttgctagaccactgctcaaggaaataagaaagacacaaacaaatggaaaaacagtccattctcagagataggaagaattaatatcgtgaaaatggccatactgaccaaaggaatttacagattcaatgctatccctgtcaagctatcattgactcccttcacagaattagaacaaaactcctttaagtctcacatggaaccaaaaaagagcccatatagtcaaaacaaacctaaccaaaaagaacaaagctggaggcatctggatacctgacttcaaaccgtattacaaggctacagtaaccaaaacagcatggtactagtaccaaaacagatatatagaccaatggaacagaatagaggcctcagaaataatgtcacacatctacaaccatctgctttttgacaaacctgacaaaaacaagcaatggggaaaggattccctatttaataactggtgttgggaaaactggctagccatatgtagaaagctgaaactggatcccttccttacaccttacacaaaaattaattcaagatggagaaaagacttaaatgtaagacctaagaccataaaaaccctagaagaaaacttaggcaatactatgcaggccataggcatgggcaaatactttatgatgaaaacaccaaaagcaatggcaacataagccaaagttggtaaatgggatctaattaaactaaagagcttctgttcagcaaaagaaactgtcatcagagtgaacatgcaacctacagaatgggagaaaatttttgcaatctatgcatctgacaaagggctaatatccagaatttacaaggaaattaaacaaatttacaagaaaaaacaaacaaccccaacaaaaaatgggtgatggataagaacagacacttctcaaaagaagacatttatgcagccaacaaacatgaaaaaaagctcatcatcactggtcattagagaaatgcaaataaaaaccacaacgcaataccatctcatgccatttagaatggcaatcattaaaaagtcaggaaacaacagatgctggagaggatgtggagaagtagggacatttttacaatgttgatgggactgtaaattagttcaaccattgtggaagacagtgtggcgattcctcaaggatctagaatgagaaataccatttgacctagcaatcccattactgggtatatacccagaggattataaatcattctactataaagacacatgcacatgtatgtttattgcagcactgttcacaataacaaagacttggaacagacccaaatgcccatcaatgataaactggataaagaaaatgtggcacatatacatcatggaatactatgcagccataaaaaaggataagttcatgtcctttgcagggacatagacgaagttggaaaccatcattctcggcaaactaaaacaggaacagaaaccaaacaccacgtgttctccctcatatgtgggagttgaacaatgagaacacatggaaacagggaggggaacattacacactggggcctgttagggggtggtggctaggggagagatagcattaggagaaatacctaatgtagatgacgggttgatgggtgcagcatgtgcaccatggcacgtgtatacctatgtaacaacctcattttgtaggttgtctgtttattgattttttttttctgtgcagaagctcattaacataattagatcctgtttgtcaattttggttttgttgcaattgcttttggtgtttttgtcatgaaatctttgcattttcctatgtcttgaaaggtattatccagttgtcttccagtttttttatagttttgagttttaaatttaagtctttgattcttcttgagttgatttttttgtatatggtataagcaatgggtcatttcaatcttcgatgtatgtctagccagttatccaagcaccgtttattgaacagggattcctttccttattgcttgtttttgtcatctttttcaaagatcagatggttataagtatatggcattatttctgggctctctattctgttcctttggtctatgtgtctgtttttgtaccagtaccatgctggcagtaaagattgaagttggttaacatgatgcctgtagctttaatttattcatttatttttcccttaggattgccttggctctttcttggttccatatgaattttaaaatagttcttttttctagttatgtgaaaaatgtcattggtaatttgaaagaaatagcactgaatctatgcattttttgggcagtatagccattttagcgacatttattcttcctatccatgagcatggaatattcttccatttgtgtgtgtcatctctgatttctttgagcagcgttttgtagttctcatagtagagatttttcacctccctggttagctttatttttaggtatcttattctttttttgtttttaattttgtgggtacatagtagttgtataaatttatgaaatacatgaaaggttttgatacaggcatgcaatgtgagataagcacatcatggagaatggggtatccatctcctcaaggatttatcttttgagttacaaacaattcaattacattctttaagttttttaaaatatacgattaagttattattgactatagtcaccctattgtcctatcaataataggccttattcatactttctattttgtttgcacatattaaccacccccatatctcccccagctccccttaatataattatctcaagttccttccatgttgttgcaaatgattggatctcatttttttatggctgaatatctaccatattttctttatccattcatctgttgatagacacttaggttgcttccaaatcttagctattgtaaacaatgctgctacaaacataggagtgctgatatctctttgatacactaattttttttcttctggttatatacccagcagtgggattgcaggatcatgtggtagctcagtttttagatttctgaggaacctacaaactgttttccatacgggttttactaatttacattcccatcaaaagtgtacaaaggttcccttttctccacaccctcaccagtatttgtattgcctgtcttttgaagataagccattttaactggggtgagatgatatctcattgtagttttgattttcatttctctgttgatcagtgatgttgagtaccttttcatatgcctgtttgccattagtgtgccttcttttgagaaatgtctattcaaacattttgcccatttttggattggattattagattttgtcctatagagttgtatgagctccttatatactgtgtttattcatcccttgtcagaggggtagttttctcccattctgtgggttgtctctttgcttcattgatgtatcttttgctgtgtgaaattttaacttgatgtgaccccatttttccatttttgctttggttgcttgtgcttgtggggtattggtcaagaaatatttgcctagaccaatgttctaaagattttcccaaagttttcttgtagtagcttcattggttgaggtcttaaatttaaatatttaatccatcatgatttctttttttgaaaaaaattatttcaatagtttttgaggtacacgtggtttttgattacatggataagttctttagtggtgatgtcggagattttggttcacctgtcgcccaagcaatgtacactgaacccagtatgttgtcttttatccctcatccctgccatccttcctcccaaggccccaaagtctattatcttattcttatgtctttgcatcctcatagcttagctcccacttataaatgaaaacgtacgatattataatataatataatatatttatatgttatatataatatatttatatattatatatatttattatatataaatataatatatatattatatataaatatatattatatttatatataataaatatatataatatataaatataatatatttatatattatatatatttattatatataaatatattatatatatttatatataatatatatcaccatatatgtatatgtatgtgtatgtgtatatatgtatatatatatgtgtgtctgtgtgtctgtgtgtgtgtgtgtgtgtgtgtgtgtgtgtatatatatatatatatatatatatatatatatagtgagagatagggttccagtttcattattctgcacatgaatgtccagtttttccagcaccatttattgaagagactatcttttccccagtgtatgttcttggcactttcattgaaaatgagtttcttgtaggtgtgtgtatttgtttctgggttctctattctgttccattgattccatctgtctgtttttatgccagtaccatgctgtttaggttaccatagttactatagttctgtagtataatttgaagtcaggtaatgtgattcctccagttttgttccttttgctgaggatagctttggttagtatgagtcttttggggttccatataaattttagtgttttgttttgtttctgtgaaaaatatcattgatgttttgatagagattacatagaatccctatcaaattgttttggattgctttgggtagtatggatgttttaacaatattgattcttccaatccatgagaatgaaatatttttccatttttgggtgtcctcttccatttctttcataagtgttttatagttttcattatggagatctttcacttctttggttaattcctaggtatttaattttatgtgtgttattctaatgggattacttttttgtttctttctcacattgttcatggttgttttatagaaatgctaatgatttttgtatgttgattttgtatcttgcaactttactaaatttgtttatcagttctagcacttttcttgtggagtgtttaggtttttccaaatataagatcatatcatctgcaaacaagtataatttgacttcttcctttataatttggatcccctttatatctttctcttttctgattgctctatctaggacttccagtactgtgctgaataacagtggtgatagtgggcatcctatccttgtcatgttccagatcttagaggaaaggccttcaattttccctcattcagtatgatactagctgtggttccgttgtatatggcttttattatgttgaggtacattctttctataccccatttttttatgatttgtatcatgaagggatgttgaatttttcagcatcaattgaaatggtcacatggtgtttatccttcattctcttgatacgatgtatcacgttggttgatttgcatatgttgaattatccttgcatcccagcaataaatcccacttggtcatggtgaatgatctttctaatgtattgttgaatttggtttgctagtatttggtcgaggatttttgcatcaatagtcatcagacatattggcctgtaatttttttttttttgatgtgtctttgtctgggtttggtatcagggtaatactcgcctcatagaagaagtttggaagtatttccttctcctctatttttttgaatagtttgagcagaattgatactagttcttctttaaatgtttcatagaatttggcagtgaagccattaggttccaggtttttctttactgggagactttttattatggcttcaatctcattacttggtattggtctcttcagattttggatttctcctggttctatcttggtaggctgtatgtacctaggaatttgttcatttcttctagattttccaatttattgtatatagttactcatagtagccactaattatcctttgaatttctgaagtatcagttgtaatgtctcctttttcattttttattttgtttatttggagattctcttttttttcttagtctggctaaaggtttgtcaattttgtttaacttttcaaaaagccaactttttgtttcattatcttttgagttgttttttacattcgatttcatttgtttatgttctgatctttattatttattttcttctactagttttgtgtttgatttgcttttatttttctagttctttaaggagcattgttgcattttttatttgaagtttttttttcctttttttgatgtaggcacctatagctataaattttcctctgagtactgcttttgctgtatcccatagattttggtatgttgtatttcctttatcatttgtttcaataattttttccatttctttttaactttttcattgacccactggtcattcagaaacatattgtctaatttccattaaagtttgtatagtttccaaagttcctcttgttattaatttctagtttattcagttgtggtcagaaaagatgcttgatattatttcatttttttgaaagctttaagacttgttttgtcacctaacatatggtgtattcttaagaataatccctgtgctgaggaagagaaagtgtattctgaggcccttggatgaaatgatctgtaaatattgattagatccatttggtctttagtgcagattaagtctgatgtttatttgttgattttctatctggaagatctttccagtgatgaaagtagggtgctgaaatctcagctattattgtaatggggcctgtctctctctttagctctcataatatttcctctatttatctgggtgctccattgttgggtgcatatatatttataattgttatatcctcttgctgaattgatatctttgtcattatatagtgactttctttgtctcttcttatagtttttttcttgaaatttattttgtctgatacaagtataatgactccttctcttttttggttttcattgtcatggaatatctttttccatccctttattttcagtctatgagtgttctaataggtaaactatgtttcttctaggcaacagaaaagcaggtcaataggtgttttttatccattcagccagtctatgtctattgattacacagtttagtctatgtcaatgttacatttacagtcaatgttattattgataagtaaagacttactggtgacattttgttatttgttttctggttgtattgtgaccctctcttctgtgtgactctctttcctattttcctctagtaatggtgactttctctagtgacatggtttaggtactttctttttaatttttgtatatccattgtatgtttttggttttaggtttccatgaaacttgcaaatactatcttataacccattatttaaatctgataacaacttaacacaatttgcttaaacaaataagcaaaaagaaaactaataaaaactctatgccttaacttcattcctccactttttaactttttttgtttctatttgtatcttattgtattgaatatcatattagtcagttctcatgctgctgataaagacatacctgagacttggtaatttataaagaaaaagaggtttaatggattcacagttccatgtggctggggaggcctcacaatcatggcagaaggtgaaaggcacatcttacggcagcagacaagagaggaaatgagagccaagcaaaaggggctcccctcttagaaaatcatcagaccttacgagacttatttactaccacaagaacattatggaggaaacagccaccatgattcagttatctttcaccaggtccctcctacaacatgtggtgattatgggagctacaattcaagatgagatttaggtggggacacagccaaatcatatcaagtatgtcctgaaaggtggttgtcgttattatttttgattggttcattgtttggtctttctacttaggataggagtagtttacacaccatagttacagtgttaaaatattgtgtttttctgtgtacttactattaccggtgagttttgtagattcacgtgattagttattgctcattaatattcttttctttttgattgaagtacttcctttagcatttcttgtaagacaggtgtggtattgatgaaatccctcagcttttgtttatcttggaaagtctgtatttgttttttatgtttgaagaatattttaactagatacactgttctagggtaaaagtaattttccttcagcactttaaatatgtcataccactctctcctggcctataaggttgaaaagtctgctgccagatgcattggaattccattttatgttatttgtttcttttctcttattgagaaaaggatcctgtctttatccttagctgttaggagtttgattattaaatgtaggaggtagtctcctttcagttaaatctgcttggtgttctataaccttcttgtacttggatattaatattgttttgtagttttggtttgctccctgttactatccctttgattaaactctttacccctatctttttctctaccctctctttaaggccaataactcttacatctgcccttttgaggctgttttctagatcctgtagacatccctcattttttaaaaaaattttgtctcctctgactgtgtattttcaaataacctgtcttcaagctcactaattctttcttctgcttcattaattctgctattaaaggactttgaggcattcttcagtatgccagttgcatttttaagttccagaatttctgctcaattctttttaattatttcaatctctttgagaaatttatctgatagaagtctcaattccttctctgtgttatcttgaatttatttgtttcctcaatacggctattctgaattccctctctgtaagctcacatgtctctttttctcctggattggtccctggtagcttatttagctcatttgttgaggtcatgttttcctggatggtgttggtgctggtagatgtttttcagtgtctggcattgaagggttaggtatttattgtagtctttactgtgtgggcttatttgtagctgtccctcttaggaaggctttccaggtatttgaaaagacttgggttttctgatctaagctgtttctgctttagggacactagaagcccagtaatactggtttttgcagactcatagaggtactaccttgatggttttggacaagatatgagagaattctctggattaccagatacagactcttgttctcttcccttactttctccaaaacatatagagtctctcttttctaagacacctaaagctggggatggtgtgacacaagcacccctgtggccaccacaactatgactgtgctgggccaaacctgaaggcagcagagtgctgggtcttacccaaagcatgctgtaatcactccctggctactgcctatgtttgctcaaagcctggggctctacaatcaacaggtggtaaagccatccaggcctgtgtccttcccttcagggtgacaaggtcccctaaaccccagttgggtccagaagtgccatccaggtgtcagagactagaatcagaaaccttagaagcctaccttgtgttctattggattgtggctgagctggccctcaaaccttcctctttccaaaagcagaggagcctcaccccatagccattgctataccaggtcatgaggagtactgcgaggctaccgacaatgttccctcaagttctcttaagtcatcttgtggtggatactgctggcctgggactcacccttcagaacagtgggctctcttctggctcaggacaggttcagaaatgctatccaagagtcaagtcctggaatcggggaccctaagaacccacttggtgctctactcactgtggccatactggtacctagggtgcaagacaaagtcctttttatttttcctgctgtttttctcaagcagacgaatttttctcccatagccaccaccgctggttatgtattgagtctgtcctgaagccagcaagtctcagaggctcaaccaaggccctcaatgtattacctgggtgttgctgctggttattcagggcccaaaggctctttagttagcaggtgatgaatgctgccgagactgtgttctttccttcaaagaagcagctttccttctggcccagagtatgtttagaagtgttgtctggaagctaggacttgtatggaacagtggcatcacaactctgactggtgccgtgtcctgctgtgactgagttggcaccttaaatgtaagacaaagtctgccccactttttcatcccctttcctcaagtggaaagaaggggtctctttgggagccacgagctgtgcagcttcgggttaagggaggggtgatgctagcactcccttggctgccccagctgttgtctcagtatgtcatgtgcccccaccatcacccagcccactgtctctgggccttattcagcactaggactcacctatgagttgtggtccttaccacctagactgcctttcaagtttacttggattagccctctgtggtgaggtttgcagacactcaagttcccacctctaggatcagggactcccctctggctagggctggtttaaatgctgcctccatgggcaggcatcagttaagtttggtccaattttcctttatgctgtaacaggacaatactgtgtccaataccttagaattcctgtgttctccctcctttagtgcccagacatgctgcacaccaggctaccactgctaggggtagaagagggatggtgtccatgattcaggactgtttattattattattattttttaatctcttccgtgcctttttcagagatatgtagtgaaaaacaggtgctatgagtgtttacctgatctttggttcttaaaaaggtctttgtttgtttgtttttgtttttgttttttttcctgtgtagttagttgttagctctgtgtccttatgcgggtagtagtggggatccttagtggaactttctattctgccatcttgtttcatccttcctcccctaggtattttattctttttgcagcaatcgtgcatgggaatgtgttcctgatttggctctcagcttgatggtcattggtgtatagaaatgctagtgatttttgtatgttgcttttgtatcctgagacttttgtgaagttgtttatcagcttaacgaagttttgggcctagactatggggtcttctaaatatagccctgttctaatatagatgctcctgcaccaaaccctttgggttccacatcttctgtcatgctacctctaccacttctgtaagcatctctccctgacaactcaagtgtccgtggtggccaagggccctcctgccaggattccataggaagagcaggttccttcttgccaatttaactcatccatttccccggaatcaagggccagtctctgtgcatggaagttctgtgcagggttcccagcttcctcccctttcagcccagcttctgtggcttccctccatttgtcagaggcatttgaaccacagtgactccatcttgaataagggttgggtaaaataagactgtgccctactgggctgtattcccatgaggttaggcattctttttttttttttttttttttttttttccagacagagtctcgctcttgtcacccaggctggagtgcatttgcacaatctctgctcactgcaacctccacctcccgggttcaagcaattctcctgcctcagcctcctgagtagctgggattacaggcacctgccaccacacctggctaatttttgtgcttttagtagagacggggtttcactatgttggctaggctggtctcgaactcctgacctcaggtgatccaactgccttggcctcccaaagtgctgggattacagccatgagccactgggcccctcctgaggtcaggcattctaagtctcaggatgagctaggaagttgacataaggtataggtcacaaagaccttgctgataaaaggatgcagtaaacaagctggctaaaacccaccaaaaccaggctgggcacggtggctcacgcctgtaatcccaggactttgggaggctgaggtgggtggatcacgaggtcaggagatcgagaccatcctggctaacatggtgaaaccctgtctctactaaaaatacaaaaaattagccaggtgcagtggctggcatctgtagtcccagctactcaggaggctgagccatgagaatggtgtgaacctggtaggcagagcttgcagtgagccgagatcgtgccacggcactctagcctgggcgacagagcaaaactctgtctcaaaaaaaaaaaaaaaaaaacacccaccaaaaccaagatgtctatgaaagtgacctctggtcatctgcattacttattatatgctaattataatgcattagcatgctaaaagacattcccactggcaccatgacagtttacaaatgccatggcaatgtcaggaagttatcctacatggtctaaaaaggggaggagctctcagttcctggaattgcctacctcttgcctggaaaattcatgaatttttcaccccttgtttagcatataattgaaaaataattttaagtaatcttagttgagcagcccacactgttgctgtgcctatggagtagccactcttttattccttgactttcttaaaaactcgccttcactttactctatggattcacctcaaattctttcctgcctgagatcaaagaactctcttggggtccacattatgaccctttctggtcacgcctccattctcagtttcttccctctgaagatctcttaggagtacaccagtcatcccagttccttgatggcagaagttccacctggctgcatctagttggccatcttctacaggttttaggtggaaaatttaatccatttgtattcaaggttattattgataagtgatgacttctgtcatttcgtttatgttttctggttgttttgtttatcctttgttcttttctttctgtttatcattgtgctttggtgttgtgtgtgtgtgtgtgtgtgtgtttgtagtggtaacatttgagatctttctcttcctcatttttgtgcaaaacactactgcacacactcatttttgtgtttgctctaccagggagttttatactttcatgtattttcataatggtagatattatccttttacttcaaggtttaggacttccctaaggatttcttgtatggcttgttcagtggtgatgaattctttgaatttttgctcacctggaaaagactttatttctccttcatctatggaggttgactttgctgggtatgatattcttgattgacattttctttttctttcagcactttgaatatgtcatcccattctctcctggcctgtaaaatttctgttgagaaatctgctattatctgacggagattccttctgttactcattttagaattatatctttgtatttgacttttgacaatttgactctaaggtgctttggagaagaccctttgggatcttggagcttcttctatttggataggtaaacctcttggtgtatttgggaagttttcagctattatttcattacatagcttttttatgcctttggccttatctctatctgaaataccaaaaatttgaatatttggtctccttatggtgtcctttatgttacatagactttgttcatttttatttatttatttttgtctaactgcgttatttcaaaagacccatctttaagttttgtaacttgatctagtctattgttaatctagtctaatgttaattcttttgcttgatctaatctaattttgaaactctcaattatatttttatttcattaaaaaattctttagttctaggatttatgtttggttattttttatgatgtttatctctggtgaatttttcattcatatcctaaattgtttttctgattttgatatggtttggctgtgtctccacccaaatctcaacttgagttttatctcccaggattcccatgttttgttggagggacccagtgggaggtaatggaatcatgggggctagtctttcctgtgttatttttgtgatagtgaataagtctcatgagatttgatgggtttatctggggtttccgctttcacttctttctcattttctcttgctgctgccatgtatgaagtgtctttcgcctcccaccatgattctgaggccaccccagccaaatggaactgaagttcaattaaaacactttttcttctcagtctcaggtatgtttttatcagcagtgtgaagtgtgaatacagactaatacagatttcttcatattatttttctgtgtcctcttatagctcactgagcttccttaatatcattattttgatttcttttccaagatttaaaaatttctattttttatcaaatctgttgctggtgttcctttggaggtgtcatattttttttctttttcaggtttttttgtgtccttacattgatatctgcacatctggtgtatgtattacttctttcaattacttgtattggcttttgtaggggaagactttttttctaaagatgttttccatggtactggttgggtagagcactttagctttcattctgagtgtgtacagtagtgttgtctccatataattttttttcttggctataaatagcatcagtggtgtcagcaatttcctcagtgacttagcctatagttgttcatagaggccatggtcagactttgctggggttggagacaccagttgggccaattttcaggtcctatgtgggctagcatgcctatccttgggcccctggatggtgtatgtgggtcttggtttagcatgtctaggcaggtccgttcttgggcctacaggcagcttggtcaggtgccagtagtggcagcactgggctggatgggtagacaggttgtatggcttaggtgatggcagtagtataaccagtcaaccctcaggctcacaggtggcatgtgctggtgttagcagttgctgcattgggccgagtgggccagtccccaggtggcacattttggaggtgtcagtgctgatggtgacaggcatggctggctgtgggaggagtgcacagatgtcagtgatgatgaatgggttaacatgattccctgacttgtggaaagcatgtttgggtgatagcggcaggttttctggtcctgttgttaggacccttggggtgtgtacatgtgcctggggtgaccaatgggtgatcccttggcccctggttggtgtccttggacaagggaatggaaggtggcagatggggtgggctggtcttcaagctcccctgataaaacacacaggtgcaagctatgatgcacagggcagggttatccccaggcttccagctgtttgtgtttgggggccagcagcagctgacattctgagcctgttgtgaggctcctttatggtgtatatgtgctcccagagtgactgatgggaaagggcaatcctcaggcccccaggtgactttcttggtgactgagcaagggtggtgcaaggccgtgagagcttgtccttttgccacctgatggcatatataagcatatactgtggtgggcagggtggggcaaccctcaggctccagggttattgtatttgggtagtagtagcagcctcattgatggtcagggggagcctgtcctcagggtgtatgcaagtgcttgttgcctgtggtgcagggaaggtggggctgctgtcagtggcagtagtcccaggcaggtggctatcaggctttgggagaacttgcttcagctccctttgttttggtggcagccttcttgtgctgtatacttgttccctagggtgtataataatatgtgcactagagtgctaggtaccctaccacattgctgggaccttgccacactgctgcagccttccagtaggatatgggggaatgtcagtgaggctccagggatgtagatatgtagggaatgttggaccccagggcaacatgcaatctggtaggagttgggctctcaaaatggtgctgctgtgtaacagctgcttgggtcttggggtagggagtgtaggacccagcatgagctccctctttggagcagtgctgtctgagactccaggcagctccgtgtattagtctcaggacctgcaaaggcctaggggctctttttgggtaggactgcaggagtctccatggtgggaatgtgaaccactggaaatctctcatttaccatttccctgtactggagatgctttctgggctcccagatgatactagctgggctggttgcctcacttccttctccctctgtgcataaggcattttctgtcacttctctgctgaactctagtgttctttcttagaggctgtactcaaagtttcattatccattcagtatttttattcttctttgtggaggtggcaagtgctaggtgcctctagtcaatcatcttgaagccccctgttatgttaaagtctttaatggaaaaagaagacaacatgcatgaccaggcagatactttgagcagagtcataggaactgcaaaaaaaaaaaaaaaaaaaatcatcggaaagaataattcggtaacagatgaaaaataccttcaatagtttcatcagtagatttgaatttgacatagttgaataaagaggctgtgagattgaagacagggttaaatcaatagaaattacccaaagcaaaacaaagaaaaaataaagggtgataaaaaacagattagagtatccaagagctgtaagaaaaaatcacattatctaacctatgcaaaaatggattttctaaagaacaaagggagaagaaggtagaaaaaccttgaaggcagccagaaaaaaaaaagacacattacataaatgtaagaaggataagagttgtagtagacttctcatgagaaaccatttaaacaaatggacaatggcaaggtgcctttgtagtgctgaaaggaaaaaaaactaacttacacctgggaaaaatatcctttaaaagttaagcagaagtaaagatcttctcaaacaaacaaaaattgaggtaacattgccacagacctactctacaagaaatgctaaagaatgtctttaggtagcagaaataagatgtagtcagaaacatgaatttatacaaagaattaagaacaaaagtgaaattgaatattttttaattgctctaaaagttaatggactatttaaaacaaaaattataaaaatatgtttataccattaatagaagtaaaatatataaaaccatggaataacacacagactaggaggacttgggaatatgctgttacattgcatattaagtggtattatattatttgaagttagatttattaacaattacagagctaattttttttttaaaaaaacaggtataaatcctctttgaggaaaacactgtcaccactgtggtctgcctttcctgttcctgagtcaccactgctctcatgctcaggaagggaacaagtaggtcaagaagttatgcttaaaagccagggcttttaaggatgccagaaagatgtcagtggaatccatagttggtgtttcaccaaattagaatcaccctacccagctgcaatgtaaaatccctggagaaggtgtttgctgacttgatcagaggctctaaagacaaaaaatctcaagttaagcttaattagtctttgagactcactacaagaaaaacttttagtgatgaaggttctgagacttgggattgtctctagatgagactctaccagattcattgacttgcacagttcttctgagattactctgatgttttccatcagtattgagccaagagtagaggctgtagtcaccgttgcagatgcttgaatgaattatttcagtaaattgattatcagttgttaaaattagagatataaataatgagtaattaggagagattaatagggaattataacatgctcaattaaattcagagaaggcagagatgagcaaaacagcaagcaagggcaagtcgaacaaagagaaaacaactaccaagatgatagattttaatgcagtcataacaataatcactttaactgtccaaatttatcagttaaaagccaaacattattagcttggatatagaagtgtgacttagttacatgttgtctacaagagagccaattcaaatataaagacacaggttaaacgtaaaagtgtgaataaggatataccatgcaaacacacaagaaaagctgcagtaagtacattaaattcagtcaaagtaggctccagaataagaaatattattagaaataaagtgggacattacagaataataaagggttaacttctacaggcatacataacagttctgaaggtgtatgcacttaatagtagaacttcaatatacatgaagcaaaacccaacaaagccacaattatcattggtgacttcaacacccctttgtagttattgatgtaacaaatagccaaaacatcaataaggatataaatgatttaaacattataaaacaacttaatttaatcgacatttatcactccaccaaagacctttagaataaacattctttttaagtgtacatagaccattcacaaacatagactgtactctgggctacaaaacaaaacaaactgtaatgaattttgaaaaatggacatcacagcaagtacgttctcaaataattacagattatactactaatttttttaaaagatatctggaagatccccaattataggaagttaaacaatacatttcttacttcttctttttttttttttttttttttttttaccgcttattatgctgcctcggttggtttcaaactcctgacctcaaatactccttctgccccactctttcaagtagttgggattacaggcatataccaccatgccaagttaaataataggttgtgaaataaccaatgaaaacagggcaaaaggtcttaacagacacctcattaaagaaaacatatagataaaaataagcttatgcaaagatgctcaaccttacttgtcattgggaaatttcaaattaaacaataatgtgatatcactacacacctattagaacagctataacaaataactgataatataggcatggcaataggaactatttgctatgatcagtatgattcaaagaagaaatcatacaaattcctcaaaatttcttccagaaaatagaagaggaactttttctaatgtattctataagtccagcaatactctgttaccaaaactagagaaagaaaattaaatggaagatacagaacaatacctcatgaatatacacagaaatttctcagcaaaatattattaagttaaattcagcaatatatataaaaaatacaatatcctgaccaagtagggttcatcccaggaatgcaaagctcattcaacatttgataaccaattaatgtaatttgatgtatttacaaactatacaagaaacatcacatgattgtttcaacagatgcagtaaaagcatttagtacatttctacgttctttcatgatttaaaaaaactcagaataaaaagaatagaaaggaatctctttaacctaataaagggcaggcacatgaaaaaaccctgctgctaatattatattgaatatcaagagattaaattttttacccctaagatcaagaataaggcaagatgttttgtcttatcactctcattcaacattatattggaagtcctaaccagtacaataagacaagaaaaaaaaagaggattcagataggaaaataagaaataaaactgtctcattttatagacaacatgactatatatgaagaaaaccctacaatctacacaaaagctcctgaaactaataacagaattcagcaaggttgcaagatgtaaagtcaatataaaaaattcaattgtatttctgtttactagcaattagcttttgggatattgattttcaatagcaccatctctcttagaaggagtatttatgcataaatctagcaaaaatatgggcaggacttgtatgatgaaaaatcataaaacagagataaaaggaataacatgtctaaacaaatggaggatataccagattcatcccgaatctaaaaattcagcataatctcagtaaaaattccagcaagttttttctataaatatcaataaacagactgtaaaatttatatgggaaggataaggaactagaatagccaaaataattttgaaaaaaaacagaattggaacacatatgcagctggatttcaataactattgtaaaagctacagaattatgataatgtggtattggtgtaagcatagacatacatcagtgggggaaaatagaaaacccataattagaccaacacaaatgtagtcaacttattttttgagaaagatgcaaagtcaattcattctagaaagtacaattttttcaacaaatgatgctgaaacaactgaacattcgtatgcaaaaaatgaactacacatactcctcacattttatacaaaaataactcaaagtatattatagatgtaaatgtaaaatgtagaaatatcaaagttctagaagaaagcagtacaacttctgtgtaaccttggatttggtgatgagttggtagatacaataccaaaacaatgaaccattaagaaacaaattgataatttgtgctttatcaaaattaaaacttttcgcttagacactggtatgagaattaaaagacacctcagaaagactggcagaaaatatttgcacatcacatatttggtagagttgttgtatccagaaatatggtttaaaacccttaaaactcaacagcaagaaaaccagcaacacaatttttaaaatctgagtaaatgttctccaaagatatatgcctagcaaaaatgcttaatgttagggaaattcaaattaaaaccacactgaaatgccactgcctacctatcagattggttaaaataacagcagcaaaacaaaaacctgataatagcaaatgctagcaagaagcaccaactctcattcattgcaggtgaaaaatgatacaaaatgtgaatagtgccgcagtaaacatatgtgtgcatgtgtctttatagtagcatgatttatagtcctctgggtatatacccagtaatgggatggctgggtcaaatggtatgtctagttctagatccctgaggaatcgccacactgatttccacaatggttgaactagtttacagtcccaccaacagtgtaaaagtgttcctatttctccacatcctctccagcacctgttgtttcctgactttttaatgattgccattctaactggtgtgagatggtatctcactgtggttttgatgtgcatttctctgatggccagtgatgatgagcattttttcatgtgtcttttggctgcataaatgtcttcttttgagaagtgtctgttcatatcctttgcccactttttgatggggttgtttgttttcttcttgtaaatttgtttgagttcattgtagattctggatattagccctttgtcagatgagtaggttgtgaaaattttcccattttttaggttgcctgttcactctgatggtagtttcttttgctgtgcagaagctctttagttgaattagatcccatttgtcaattttggcttttcacaatagcaaagacttggaaccaacccaaatgtccaacaatcatagactggtttaagaaaatgtggcacatatacaccatggaatactatgcagccataaaaaatgatgagttcatgtcctttgtagggacatggatgaaattggaaatcatcattctcagtaaactatcacaaggacaaaaaaccaaacactgcatgttctcactcatagatgggaattgaacaatgagaacccatggacacaggaaggggaacatcacactctggggactgttgtggggtggggggaggggggagggatagcattaggagatatacctaatgctaaatgacgtgttaatggttgcagcacaccagcatggcacatgtatacatatgtaactaacctgcacattttgcacatgtaccctaaaacttagagtataataataataataataataataataataataaaaagaaaaatgatacaaaatggtatagccaatttggagaatagtttggcagtttcttaaagttaaacatacactttctctacttcctggcaatcatgtagggctgtgtcaggaaaagtgcacgagaaatcaataacatcttgtagtgccacagactaaggaagtgcaaaaaaaaaaaaaaaaaaaaaaaaaatatatatatatatatgcaggcatgtcaaagaacacaaaagctaaactctaagagatcccaatggccaaacttggaattatttgagcaacaaaagaaatgatagcactggattatggcctaagaaataaagtaaatatccatgagttcatactgacataattaaatgattagataaacaaatgggacagggaagagacaaatcttccttagagaattccgaatagtaaatgcagaaggaatgagagaaatagaaaatgaccattacagcacctcaatagtaatggttacaagcatgacccacagatgaaggctaaacttagtatttgaaactgtaccgagaaataggatatttacatagcctcaataaatgacagccccaagatatttattaatcactgttgtggttttaacagtttctacaaattcctggatactcatctttccagaatatggagcttaattcctttctctttgagtaaaagatggatttagtagcttgcttctaggcaatagattatggaaagggggggaaatgttaattttacagaggaaaaacctggcagacatcatctaactaagtgatctaactaactagataataactagttaactgaaataatctagtactaaatcagattaatgatgtgatgtgttgtgatgacaagggcagtagactatagtgaaattgttcccccaaatttgtatcccctatcgaatcatgagaaaatatcagacaaacccaaattgagggtcagcctagaaaagtacctcaccagctgtcttccaaagtgtcaatgttatggaaaaaaaaaaaaaagaaaagattggggacactaggggcacatgatgaataaatgcaatgtggtatattagattggatcctggaaaggacttcagtgaaaaaactgatgaaacgttttgatacatgtaccattgttacataaaatggtaaccttagaagaagttgagtgaagcatataaatgaactttctgtattgtctttgtaacccttcggtaaatcaaaaattatttccaaataaaaagaaaggcatgtcgtcctgcacagggtggagtagcatggatggaagggaagcctgggggtcttttattgtgaggtggtgtattgaccactcctcctgctatggctcctctttttgtagcacccatggttctttcctgtcacaagctttgttttccaaacatcattctaggagaccttcaatatgttcttcgtaaaataaccttggctttgtttagccagatatccgttgcttacaacatagtatcctgggtgatatggtttgctttttaaaatttaaatgatttagtcactaattatatttgtccattttcacactgctgataaagacatagctgagactgggaagaaaaaaaggtttaattggacttactattccacgtggccggggagccatcggaatcatggcaggaggtgaaaagcacttccttacatggtggctacaagagaatatgaggaagaagcaaaagtggaaacccctgataaacccatgagaactcatgagacttactatcatgagaatagcatgggaaagactggccccatgactcaattacctccccctgggtccctttcacaacacatgggaattctgggagacacaactcaagttgagatttgggtggggacacagtcaaaccatatcattccaccctggctcctccaaatctcatgtgctcacatttcaaaaccaatcatgcaatcccaacagtcccccaatgtcttatttcagcgttaatccaaaagtacacagtccaaagtctcatctgagacaaggcaagttccttctgcctatgagcctgtaaaatcaaaagcaagctagttacttcccagatacaatgcaggtacagatattggttaaatacagccattccaaatgggagaaattggacaaaacaaaggggttaccggtcccatgcaagtcttaaatccagcagggcagtcaaattttaaagctccaaaatgatctcctttggctccaggtctcaatccaactcacactgatgcaagaggtggattcccatggtcttgggcagttctgcccctgtggctttgcagggtacagcctccctcctggcttctttcataggctggcattgagtgtctgtggcttttccaggtgcacagtgcaagctgtcagtggatctactattctgagttttggaagatgatggccctcttctcacagctccactaggcagtgccccaacagggactctgtgtgggggttccaaccccacatttccctactgcaatgccctagcagaggttctccatgaggcccctgcccctgcagcaaacttttgcctatgcatccaggcattgccatacatctgaaatctaggccgaggtttccaaacatcagttcttgacttctgtgtatgcacaggctcaatgctacatggaagctgccaaggcttggggcttccaccttgtgaagccacagcctgagctgtatgttggcccctttcggccatggctggagcagctgagacacagagcaccaagtccctaggctgcacacagcacaggaaccctgggcccagcccacaaaaccatttttttctccttggcctcagggcctgtgatgagaggggctgccatgaaggcttctgacatggcctggagacattttccctatggtcttgggaattaacattaggctccttgctacttatgcaaatttctgcagccagcttgaatttctccccagaaaatgagtttttcttttctattgcatagtcaagcaggaaattttccaaacttttatgttctgcttcccttataaaactgaatgcctttaacagcacccaagttaccccttgaatgttttgctgcttagaaatttcttccaccagataccctaaatcatttgtctcaagttcaaagttccacaaatctctagagcaggggaaaaatgtcaccaatctctttgctaatatgtaacaagagtcacctttactgcagttcccaacaaattcctcctctccatctgagagcacctcagcctggaccttattgtacctattctatcaacattttgagcaaagccattcaacaagtctccaggaggttccaaaatttcccacattttcttgtcttcttctgagtccttcaaaatgttccaacctctgcctgtttcccatttgcaaagttgcttccatattttcaggtattttttcagcagtgtcccactctgctggtactaatttactgtattagtccagtccatagtcatgctactgatgaagacatacccaagactggggagaaaaagaggtttagttggatttacagttccacatggctgggaagccctcagaatcatggtgggaggttaaaggcacttcttacatggtggcagcaagagaaaatgaggaagaagcaaaagtggaaacccctgataaacccatcagatctcgtgagactaattcactatcatgagaatagtactggaaagactggctcccatgattcaattacctccccctgggtccctcccacaacacgtgggaattctagaagatataactgaagttgagatttgagcaggaacacagccaaaccatatctctaattattcatatgacaatattgaacatatattttagtatctatgtatagtttatgtaaacatatagagctgtgaaataatgtggaatagtgctaagcataaaagaagagttaggtagtttcagttgaagaacagttatacttacctgggtagagatggggagaggaaaacaggaaaagctttgtggagaatactgaatttgaattaggagagtatatagcatttagacaaattatagtccaaattgagcaaccagttgctgaattttggttttatgtttatccaaataggcctttgtttctgcacaatattaattgaatatttttttcatcttcactacctacatatttacccattgtaaataggtacaaaatagattccgtgctctcacacaatctgattacccccaattgatgtgagtgtatccctgcctgccctgaaagagagttatggcaattgtgatagaattaaaatggtcagaactggggcaaagaacacaatctgatgtatcaatactttgttctctacaagatgatgctcatcatgggcttttaaaaaaagttttgttgtttttggcttctcctaaaaacatattgagttttacccagttgcaaaacaatactgaaatataaatgttcaaatgtactagtttgattacattagggggaattcatgacttctagagtacctgcccactcttgctatgcctgtgggcgatagggatgctatcaatgaaaggagcataaattaaacttattaagaagttcttcatgtgttacagacataatttagcatgttcattataatggctgaagccaaaggatggattcttacatggaatgttatgacctcactgaatattgtatttcacttagctctagaagcagaggaatctgtatcaagtcataaattatacaagaagtgtaaaagtgacacctgaaatatggctaatagatcaaagggaatggtattttaacttctattaaggaatttatgtgtgacactgtatggatgagcattgtgagtcaaaaagatgataaaattttagaaacatatcacaacatagatttttataaaggatgtatatgtacactttagcgaacagtaaaaaagtagccatattcctggcacctggtttaaaaaatagaatattaccaatatctttatagtccctgttttccttctcggttcccatcttcttcctttctcctagagatacttgtgaggtgaaattttgtgtttattattcatccaactttcattataattttattagaaatgtgtagatttatacacaacatatatgtttaattttgtatgcactaaagcacatataaatggaatctattgtatgtgttcctctgtgatttgctttttttgtcaatgttatgcttaagttttaatcattttgatgtctaaactatagttattcatctttactactatatagtgttcatttgtaataatgcccacagatatttttatttattctaattataatgaacatatttcagtgcctacttctagtagatgcaaacacatagaatgtaaaatagtgcagaaatactagttttctattttaaatgtgaatggacacatgagagtttctctagaatagtattttttaagcttttctgaccattaccttgataagccacgagttggctttgcaaaattcttacaaaacaatactttgattgcaagggatttcctttgacattttctatcccattccactccatttcattttattgaaaatattctgattttgtcccctgatattcatttatcgagccactaatgggtcataatcagctaccacccagcagtttttaaaacattgcactagcatgaggaatgaaattgctgggctgtagaataggcaggctttcagttttgttggacagtaccttattgatttccaatcatctgtgaagttgctctcccagcagcagcacatgtgttcgctttgctccactactttgctcacttttgttattgtcagatatttacattttctggtttattatattttatatttttaataaaagaaaattgaactggaactcaactgtaaaactcaccatagataattcagattagtgtaaatctactcagtctattaataaaaatgacacattgataggaaaccagaagttaccattttgggggacattttagtaaatgagttttttaagaaaaatattgatttatgccaaaagtattcctaaaaagtaaagcataatcagatcccaaatcgacatttttgggggtctcaaattgtctggatcaagagtcagctatgaaaagtatgaatctattgttgtaaaaaatctgctttgggcttaatctgaatcagcagaaattttagcaataccataagcaaataaaatgtgttgttttgggcttttacgctcaagtctacaacatattgaaggaattcctagtgttgtttttctgctgtttctgtttaaacttcagcaatattttaattcccccgattttccactgtcttcaatgaagaatgataggaagagatcagaataatctgcttctttcattcttaattccaaatccttgagatacatttctggtgtacatggccctcactagtggtaaattagggtcttgggaggcagaggaacttgtactctatgatttgtgcctctaactggcatgtagaaggttcaggagtgtaagatttctaaatttccatgcaggcaatcctttagaggtttgcaacatccccaagccctcagccattccaaagtgctgaggcaaattaagaaggccaaggaagtcagttaagttatcttcttgtagacagacagcaaatttatttatggcaaattctctggccacttgccaacatagaacactgttcacacaaaactggttgggaaggggaggcagacaaaggaagccttcaaagctgaatcctgggccatagcattactggggcttcctaaaagaacagcctctatagttttagaagagtaatttgggtgaaggtttcctgatagggcttaaaaagggatgtatcctaccataagatgagtctactctatggaaaatgatattttatagcatttcaacgacaacatttcattttgcagagcagcacacatcatccagggaggaaaggagtaacactggtaggagttaagacaagcaagtttttggttctggtcttgttgtcaggcaattaaaataacaaaaaccaaacaacaacttctatttagaactggtcaagatgtttttagagtcataaaattccatctattttcataagttaaatgtaacctacaacatcatttcccatttaactctcagattgtgttctctatttcaaaaatgaatagaaagactctccacatggagtattctctgtcagtttactttgagttctgaaaacttctggttttcacacaattattttcatagtcatagttatgttatttaaagaaatagtttcatttaaatgtgagtctaaaggctgaagaaaaaacctcccaaacaacaaaattttagtttatggtctctcttaggtctaatacagatagtacttgatataatttcaattttcttttttttttttttttttttttttttgagacggagtcttgctgtcgcccagctggagtgcagtggcgcaaccttggctcactgcaggctccgccccctggggttcatgccattctcctgcctcagcctcccgagtagctgggactacaggcgcctgccacctcgcccggctaattttttgtatttttagtagagacggggtttcaccgtgttagccaggatggtctcgatctcctgacctcgtgatccgcccgcctcggcctcccaaagtgctgggattacaggcgtgagccaccgcgcctggccaatttcaattttcttaactttgttgagatttattttgtgacctaccatatggtccatcttggaaaatgttccatgtgctgatgaataaaatgtatattctgcagttgttgagtagaatgttctgtaaatatctgttaagtacatttgttgtagggtataagtatatagttcattgtttctttgttgactttctttcttgatgacctgtttagtgctgtcagtgcagcatcaaagtcccccactattattgtgttgtcatccatctcatttcttaggtccagtagtaattgttttataaatttggaatctccagtgttaggtgcatatatatttaggattgtgataatttcctgttgaactactctttttatcattatataatgtcccactttatcttttctaactgtggttaacctacttacttttggtttccatttgcatggaatatctatttccacccatttaccttaagtttacgtgaatccatatgtgtttggtgagtctcttgaagacagaagattcttggttggtgaaattttattcattctgctactctgtatcttttgaataaagcattacgttaaacattagtattgaaatgtgagatactattctattcatcatgctagttgtattctgaataccatgattttatttttcattgtattattgttttataaatgccctgtgagatttatgcattaaggaggttctattttggtgtattttgaggttttgtttctagatttagaactccctttagcatttcttgtagtgcaggtttggtagtggcaaattctctcaacatttgtctgaaaaagattttatctctcatctatgaaacagtttcactgggtacaaaattcttggtggataattattttgtttaaggaggctaaagatgggaccccaatctcttctggcttggagggtttctgctgagaaatctattaatctgacaggttttcctttataggttacatgatgcttttggctcactgctcttaagatttttttctttcatcttgactttaggtaacctgatgactatgtggctaggtgatgatctttttgtgataaatttcataggtgttctttgagcttcttgtatttgggtgtctaaatctctagtaagaccagggaggttttcttctattattttctcaaataagttttccagacttttagatttctcttattcctcaggaacaccaattatccctatgtttggtcatttaagataatcccaaatttcttggaggctttgtccattttattaaattcttttttctttgtctttgtcagattgggttaatttgaaaatcttgtctttgagctctgaagttctttctaccatttgtttgattttattattaaaactttccagtgcattttgcatttctctgtgtctctcatttccagaagtagtaattttcttttctttatgataagtatttctctggagaatttttcatctatatcttgtatttttttttcttctcttaaagttgtttttcaacttcctctggtgtctccttaagtagcttagtaattggcattctgaattctttatccagcaattcagagatttcaacttggtttggatccattgctggagagctagtgtgattttgggggggttgttagagaaccttcttttgtcatattaccagaatttcttttctggtctcttcttttttgggtagactgcttcaatggaaacatcagggactcaaaggctgctgttcagattattttgtcccacgggctgatcccttgatgtggtgctctccccattctccgagcgatggggcttcctgagagccagactgcagtgagtgttattgcccctctgggtctagacaccaagtggagatacggggctccagactggttctggggaatgtctgccaagagtcctgtgatgtgatccgtcttcacatcttccagttttggataccagcacctgatctggtaaaggtggcaggagagggaagtggactctgtgggagtccttagttgtagttttgtttagtgttctggttttctcacatgctggttatgctagcagtgaagttgtcacatggatggactcaggatctctggtaagccaacgtgttgcaggtggtggaattagctgttgtttttctccttctttgttttgagttgctctaatggcttgagttggttggcctctagccaggaggtggcactttcaagagagcaccagctgtagtagtaaaagggggatataatgttgtcctatgttggccaggatgaatacttatgtttctcaggtgatgggcagggccatagtgcttccaagagcttatgtcttttgtctttggagttttttggctgtgtcacagcatttgcagtggcaagccacgtctttcaaatggtctttgaattcttttggttttcctggtgtgtttctgcagttgttcctggagcaaaagttcacaatgtgagtctccagatgctgtttcgtccatccaagcatgagctgcacgttagtcctgtttcctctccaccacttgccctcctcccacttttgcctctagtgttcagatggtagcctcgagaatcatgttccagttagactaagcttctccaacacgcagcccacaagccatatgcagcccaggatggctttgattgtggcccagcacaaattcataaactttcttataacgttctgagatttttttgtgactttttttagctcatcagctatggctagtgttagtgtattttatgtgtggcccaagacaattcttcttctttcagtgtggctcaagacaattcttcttcttccagtgtggcccaggaaagccaaattggacacccctgagttagactcttccatcattcactatacatctgaagaaataaaaatgtcttatccacatccttgctttgacaaatagctcagcaaatacaccattagtcccaagataacactctaacttaaatcacttagggattaaccttatgtgtgaatcagtgatactccctatttcctagtcgagaaaaacccaggtgttaatttttgtaattgacctaactgcctcattagtgttattttccccctttgtaatggctgtgagacttgtgatatttttgtggctattttagctgctatgttatgtaaaaaatttcccaaattggtgataacaagttgaaaacattcctaaacaattggagaaagtggttcttaagtctacgctggaggcatccagacagctggaagctgtgcctgagtcctgaaaagctgatagaatacctacaggcaaaccaatcagctagtgaggtgctcacagctagtgagaaactccagttaacaaactccacagcctattgtggagacaagctagctttctgcctctttgttccacatctttacattgcataatattttgcatttattaatattaatagactacatagaaatagttgccaagtctttcacctcctatgccctggtggtactaataggcatggaaactctggcaaaataagggaaaagaaggcggggaggcaaggaaagttggccaggattaaaacaagttatggaatttatgtcctctggagaagctttaatgacacatgtgcctcaggttaagaaaagaacaaatacattttagccgcttagggaagtgcatcttgctggaagataggaagtgatcaagcaaggatgtggagtcaaatgccgaggatcagagaaataagaattcctggttgccctgaagattcaatgcatggagtgaggttcccgaaattgggaagccacacacaggacctggtatcttccaaggtctcacctgcccagtagggaaaaggaagcaccaactagcaaagtcaaggtgaaaggtaatgctaatgatcaggatctctggtaagccaaggtgttgcaggtggtggaattagctgttgtttttctccttctttgttctgttatgagttgctctaatggcttgagttggttggcctctaccctctagtgatcttctcacttaaagttcatacacggacagaccatgagttggttaacctgacatccattcccaattgcctgcagctactctagcagccaggagagcgaaatgctaccttcataatctcccaggagtggctatcttataaaggagtcactatccctgacattgctgagttgctaaattaacatcagcacctgtgtgccttcagaattcttgttaaaagagacaaatgaacttcattttgttgaagccacagtaaaatttttttgatacttgctgttgtctcattccttattatatgacatgtatattatgtaagttttctctgattaaaacttttcatataactttttagtaaagagtgttgccctttgtttcagatatttcggggtgggctggggaaagccatggagcctgtacatgttgataatatcccatgaaactacttggaggaattaatgcgctgttgcttgcatggatggatacagatgtaataaagcactatccaaaaatgaggctactgactcactgtcaaattttttctgagtaattttttaaataatttcttatgattcatgcattttaatgccatgtccattctgggagtttgggtgtagtctatggtcctggtactactgaagttatcagattctttaaggttggtggaagacatttgatatacggaacatagagaccaaagtgtgtgtgtgtgtgtgtgtgtgtgtgtgtgtgtgtatctttaagagagagagagagagagagaggagtgttttatgggaaggctggagcagagattccaagaaaaactattttatttattactgtttcctctcagttaacatttctggaacatttaaaataagataatattatcattttaaaaataccaattgcatctctgttattcttggtttactgtagggtcaaagccccaaatttaattaccccagggaaagaatgctggtgaaatttctgtccccatcctcccatatccagaaaggagaagaaacatgttgaaatttgtctactcctatgagcttcaaagttctcttttcaagcagaagtgttggggataaagttggatgatttgaacctctaggaagggatagtatccattgaattttacattttgctaagtgtgatgaaaacaaaacaaaataaaacaggtgcttttcaaatggaggtccttaaaatctgcagagatttttccattcagcttaattgtaatatttctttcttgtgtcaaatttggcaagggtctagaaatttatttctctcttatttggggtattgtgaagggaactgattcaaaggccaaataagaattaaggtttgaaagttaaaatttattggacatgtcttctaaagctatattatttcatgtctttttccccataaagccaaataaatctttagaactcttcacatttcaaacacaatatttttcatatccatgaagtgattttctgaagctcttgagtatccttgtccaatgcatatggcttttatgcctgcacagtacttagcaggaatgttattagttatgcttcctgagaattctgagggtgaactcatattgttaactggtttgatacttaagaaaactggctaaggcttatcagaggccacttctgtgaactcttggagttgtaacatgtgccaaacggctgaatcattctgtactttgatatatttttaaaggttctttaaacataccctagaatgaaacagctacttagttatattgcattttcaagatgtatcttctaataatatctcatagatatcttttagtttagctacttcctatacattctaatttagtgttgatattgacttttttttttttttttttttttgcatagagctcagattgggaaacatgcctggaaaaaaaatctctgataaactcacatacaatacccttgccagaaacaatgcttcagttccaacgaggtctagaagggaaatgctaacattggcttctttatctagaaaactggaaaatattatatttaatatattaaacattatgttaaattagggattttgatatgttgatgatacctgtgtaagagactcactgaatacaaccaacttagttccccaaagttggacaggagcaaggcagagcggggactgatgtgttctggagactagggtgatagaacaatttcactaaaagccagtggctctcgcttctgttaccctgaataaagactctactttgtttcaggactatttggctcagagggatggttttagaatcagggatgaccagaaagaaggtaaagagctgcattcttaggtgcccagtttaactctttttcaggtttctggacttgtgttttccaggagtggtgacaatgtggaaattatttgtgttccctctgattgggctcaaaactttccagacaaaacattggtagaaaataccagaaccatatttttgaggggaagaaagttggcagctaattttaagcaccctccttatactgatcttctattctatggatttataaactaatacacaatttcaagatacatttatttctatttaataggtacctagcagctcattaatgctatatttgtaaggaaaatgacaaacatttttctaattatgtacttaatttacaaaatgcagagtaatgtagcaatcaagttgttgatgttattatgcaagtatgagataggggatttttaaaatgatatccgatattatgttacgtggacatttgttagggggatttggggaggaggcagttttgatagaaaaaatgtgagagtacatagctttccatatctggatttctcttcacactaggggtgaatggctgattttgaggaactggaatttagctatctattttttgttgttgtttgctttgttttgaaaggcacttatcctttatttctgagcataaggataggcatttacctcaatacagattgtttcttaaatcttagttaatgcagggcctgataggaaaggtatgtttttattgttaggtgactcaataactagattttccagtgtttcttttgaagttgaagtatttactggaacccagggcaaagtagtacagagatgaaagatagccagtaaatggtgaattattaaggctatgtgaataagcagtcttccaatacggatgactggagcttaatttcatggggaaactttgagaaatggtagatacttctcagaataattcttctgaagaggcaaggaagcttgcatatttatacaccagcttccatcattattggttaaaggttgctcccagggagtgttacttccctggcacttgtacttcagtagttctggcaagagtcctccggcacagagaggcagcccctggccattcaaagtcatctggagaaagcagatagtgggattcaagggatataggtggggcagtggctgtatatgttacatcggcaggtgctgtaactgatgcggtccaagaatccacacacagaaggcatccttatgcacggaaaagtttgagaaccattaatatgggctattgatcaataaatcataaattgtcagagaattgtttaatggaattctcattttgtaggtaaggaaattaaagtccagagaattttaatgattggcttgatgtcacagaaccacttttagctcaatagtctcatgatttaatgaattattgatgcccaatttcattattattaatttgagggctagatatttcaaaaaaatcaatacaaaggcacatggctccagtgcccttccccttccttttcagcaccatttctattgaccccttaaagctactcacccacctgtgaggcattcctttatacgtgccaatatgtgaaaatcgttttcttttagaaactttctctgctccctacctttcaaaccttgcttaggaaaagatctttgaagtttattgatactgaggtataaatgactaaatttgctttttattgaagtgttttctcaataataaaaagtaaaatcttaagcttcaataatgaagctttaacagtttcagttgagaggaagttaatttagggttgaaagggcctgagactaattttaattattcataaatatggattgtcacatccttttggaaaatactgttgatcttgtagccattaaagtgcattctataagatgaaattgatttagcatggggaacactggtgatccttagaagagaaactcagtatttaataaatgtgaaaataatgagaaactacaatatagtaattattagagttttataatttagaaatacataagtgtagttttcatcatattggatcacataaaaagatcttaacttcctgcagaaaaagtctattttttgttacaaactagtataaatagcacagttcaaagagaatcagaaaatactattcaaataattttaaaacttcaatatttgacttttaactactgtaatgttccccaaatcatgttttgtttttgactataattaaattgcattttgttatattcagtattgatagctgtcattttttgaacccctactgtgtgtcagataaaaatgttaggggatttacatactatatttctttagctttgcaataacttcgcatgatggatatttttatccttattttatggaaataaatgaatgtacataataaatttttatgacaaatttgatgcctagcacttcatagacatttagaaactatttttaaaataagcatgagtgaatgaggacttgttccaagccacgaagctttagagtgataaatggagccagccgggtgcactttagccttcagaactgttccagctgcccatacacagggtttgagtgaatggttctgacacctaccgaactggcgttagcttggcctggaggatggtcagcacagttgaagctgggtgcactgggacctgttcacaggtgattgctgataagaaaactctcttatcctttaatccttgacctcatagagcccacctgatgccctggagtaactccctcctgagaaatgggtttgttgtctcaggcccactcagttcaatttatcagtttataactctgtcaaggatctctagctctttcttattgcccagggtcacatatcattcatttgttcactcatcaaacatttattaagaactactgtgtgctggaagcttggccgaatgctaggaattcaaaaacaaacaattgagtgagatggattctgagttaggggaatccacaagtaacccaatagatgaccagatggacatcttgagttcctcccaggattctaaaaagaaaaaatgcttttgcaaagaatgtttttacggaccagagaactaatctaaaacaccaatgatgattaaatagaacattctattcagacattagattttaaacttttataaaatttaatataaaatgactgtggggtaaataagcagggagcaaggcacttcctgggaatccctaggccagccaagtattcctgagctatcctcatcactaatctaagaaggatcctggagcaggcataccctgataccatcccagaacaaagcctgaaaggcaggcagttggtttgacagctttagaagacaccatgttcagctgccatagctctcagagtgtgagtgtaagtgtagcatggctttgttatgcagtcttatggttaatagtaggtagccattttttttgaaaggtctgtgcatgctctctgacatggtctcaaagtaaaaacaatgcacaatgaaaacgaagttcttctgatctgaattctgccctaaatcaaagatttcttttgtcacaagagattctatttgggataagctaatgtaactagatttgttcatagacttttgaggaaggcatttgtgtgtgtgtgcgctaagtttcagtcataaaagttagtcatggtgtcatgaaatagttgaactgtcttttagaatttttttcaggattccagatagaatgtttttgcaaagaacattttttcccttcaaggctcatgttaaaataaaggtcaggaaattcagtcaagtaaacaagttagccacaactttcatccaaaaggacacgcatcacaggtgtcgctcagtgccactggagttggtttaaacacattggttatggttatacatagcacttgaagttcaaacattcactccaactccatcatcacttacttaggttgtccctgcaaattccttttggactctttctttgccaagttcaaaaagtaatgggttcttaactataacagagaaaaatcaacttctccattttagaaaaaggtaaaaagttttcccttccttccttcctttttttaccccaaaaagaagcttctaaaatgcaaataaatttgtaaataaatacatttcagttactgtaacaatgaaagcaatacactagtttatctaagtgaaatttttatacattttgcttttactaataagttgtagtataagaaaataatgtcttatttttattttattttatcatttttataaatccacagaaaataaaaaagataattgggaaattaatatatctattatgatttttaagtaaaccttccactgaaatatgatataccatgttaaaaaagcatgttccttataagtgtacagcttgatgatttttttcacaaactgaatatacttgtgtaatcagcactcaaatcaggaactagattatcaccagagcattatcgcagaaacccatctctttttctctaatactcaatggcattttgtacccctaagggtagccactatcctaactaataacaccattaaacttttgcctgtttgacttttgtaccttatataaatggagttatgcattatttattcttttgtgtctggataatgaattgtgcaggtgggaatatggttatgcgtgtcttttggtgaacacatgcatgcatttctttgaggtataaactgaacagaggaactggtgggttataaggatgtgtgtgttcagttatcataggtaatgtcaaattgtttacaaagcggctctacatgctttctttctatgctcacttatactaaactatactgcttttctcaatctcatttgtcattagggagatttctttaaactgaaaaggttatctgaaaagcactctgttgcatatatttaaagatcatttttgctaatatggttattttcagtggaatgtttttgtgtcctaaatcttaacttgtaaaaacctatgctcctaatagtacaaacaattccatctaaaagtcagaccgtaagttcagcaataaaagatgaatcaccatgagacaaagctgtacacacttggaaacatagtgtatatactaatctttcataaccaaactattcctgttacaaaatgatactagattgctttccaggaaagtcaagtgaaaacattactaagtcttttcttcaagatatatcagagtttttatttgcaagcaacttgaaggcaactctggttaatttatcagaaaagaaatgtgataaataattttggaaacccactgaatctcttggggggccagagaaccaggcttggagatatctcagtcttgcaagatgccttaaaatatgttttgaactggtcctctatagaccaattgctacttccacgggttacagatcccatagcctgccctatttgtcagtctccaagatggccctagtgagtctcagatcctgacatttgtgatcttgtgccgtcttctgtcacacatagtcagggcagctctgtgtgaccaatacaggtggcagcacgtgacttaaaggctagattataaaggacattgaagcttccccttggtctcccacactctgggggaagccagctgctaggccctgaggtcatgcaaggagcctcaaggagaggaactgcagccacctgctgactgccagcaccaacttttcatgctggtgagccaccttggaagccagccctctgtcttcactcatagcttcagatgattgcagccccagctgatgtcttgactgcaagctcttgagagactgagccacagctactcagccatgttgctctaagttcttttttcttttgtgtgttttttttttaagagacagtgtcttcagccatgttgctctaaggtatttttttttttaagagagacagtgtcttgctctgttgcccaggctagtgtgcagtggtgtcatcatagctcactgcagccttgaactcccaggcccaagcgatcctcctgcctcagcctcccaagtagctgagactacaagcacatgccaccatgcccggctaattgttttattttttgtagagatggggtcttgttttgttgccaaggctggtctcaaagtcctaggctcaagcaagcctcctaccttggcctcccaaagtgctgggattacaggtgtgaactactatgcttagccaagcttcttgacccacagaaactgagagagaaataaatgtttatttttgttttaagtcattaaactttggggtaatttgtttcacagcaacagatagctgatacaatcaccacccagacatgggatacagctactggaactgttggcaccactgcctttgggaactggatgtatctgcaagcaacattacccaaatgcattctggataatccccatttcttcgattatacttctgattcaaagtctgggtcctttgcaattgactgacattgcgtgggttcacatgccaatattttaggtaaaaggaagacttggaaattcaagtagttgatcttttcagaaatgcaagtagctgatcttttcagcttctagagtatgagatcagctctatgcctcataaggttggaaactcctcaaacttagaaagagaggttagatactaggcagtccattgtccaccataccagggcttctcatagtgtgggccatctgtgagtgagtgctgtctgtgagattttgctcttggtccacaatgagataaacatagaaaatgagaataggcagccagaaactttcatagcaacttgacattgccatgatatttttattgtatttgacaaaaatactgatacacaacaaattggaaattaaaccagaaaataccacagatagtttgagaagcactgatagttttctaccacaaatagtttgagaagcactgcactacatccatatataacaaaggacttatttgaaaacactatgcctctcaactctgcctccagagcctcaggacaaagctggtttctcatgtgattgatatcacagagcagcgattttctctgcactcctttagttacccaaagatgctgacatgctttatatataaactcattgcattaaaaatcaaactattttggcccatgggcaagacgcaaacaagaataataatcttgtaattgtcacaacaaacctataatatgaggtaaatattgtggtgtcccttttaccagcgagatagctgaagcaccaagaaattaaatgatatactcaatcacatggctcccaagtgaaagcaccaggctttgaacccagacagcttggctcttgctagcacttgcacttttggccactctgcagtactgcctctctaacataacaagaaaaagactggcatatatccaagatattatatccaagtattgcctaaatatgaactttatttcctctttgaatcatggcctttgcaaagacctctaagaatatttaggcaaattatattcttcttaatagtcaatgtactatatatttcaaaagatccgatgcctgctgtctacagcgttataatgccctgagacataataagtgattgctttccagaatgaagcttttaagataaataactttgtgtttttaggtcatttaggaatattgccccttttttaaaaaaatggagtatctcagcactaacacacacactttttagaattttaatctctgaaatattttccagagatttcagcattacacaacagtcttattaaaggtgcatgtatgcatttttatttaatctgatccctcaacaagcctggtccatttagcagaccagaaagctaatctccagaggccaaaggaccaactcccaatcgtgaagcagctgttcatgaccttagaggatgtcagagcaagtctgaactcttggttggaggtttttccacaccctgtatcaattcacttccgccactaactgacagagacctaactgaagatttcaagactgtaaattcccagcacacttcgaagaagctggggatggctgaaagtcatttcacagtaggattgatttgcagccaggatcaaccagcctttggcctcatttttgtgtagtttggacgattctatcatcagatctgcctctcgatataaaatgtttcctgtttgagtttcctttttcaaatgaatggatttattatcctagaggaagacttcctagctgttctgagaagggcaggatgaatgaaaggttatagatcaaatgtgtttatttgtccctcattagctgagaattggtttatgtgtatcattttatggaaagccaaggaataatgacacacatattgaatttattgaatcaagtgtaacagcactgggaaggtctaagaaaacagatatacacatatacagaaaaagagagcgtttacatggccatttctcatctcactagggaagtcaagatgtgtgcacgaaaactaccatgccagtaagtgaacagtgccagtaagacagagaacagtgttagatgaagaagacagaagctttcatagacaaggaaaaactagaatcttaggcaggttttagagaacaacaacgttgcttaatacttactaaacatacacttattaaacatgacctcatatagctttacaatagctatttaaattaggaactactgtactttattttctgtttcacagttccagaaagtggattgcttacatcaaatagctagtaaaagataactcgaattcaagccagactctaaaggacatgctcttaactgagcacttctctgtgctgccttgggctgggcatagtagagacgtccaatctccagggcagggatagaatacggaaaaatctaagcaaaggtctggaggtgagaagggaagcatgttctggggtcagtgcaatcagcctgcctaaagtagatggttttggggaaaaggtggggttgataaaattggagaatcaataaggctgaaaaatattacaagaattaaagattcctacattaatggattctgagcaggaaaataatattacgtaaaaactgcttttgtaagaagggtgaactcagcagtcatgtgtagaatgatagaagagcagaggcctggaggctggaaaatcattgagaagatgttgcagaagtccaggaacaggcagtgaaggcctggactagtacaccagttctcaaatttttggtcatgggtgtactgatactcttaaaaataattgaggagtccagaagtgttttgtttgtttggtttttatctgtcgatgtttatggtatttgaaattaaaacagaattattttaagaaaattattaaatcattttaaaataacaataaacccattatacattaacataaaagtaactatgctttttcatgaaaaataactatgcttttaaaaatatatagtgagaaaaattatactgttttatacttttgcagatttctttaatgtttggcttactggaatccaggtggattgtcatacatccagtgggctgtgatgttgcacaatgtgtggactaaaaaattccactgcatgctaatgagagaaacagtgaacatggcaaatcacaccttagtattcccatcatagtagtttcgaactcatgatactctgaaagattcttgggagttcccatgtttccaggccacaacttgagaacctcttggctagagtgtagctgagaagacgcagaaacacagagaaacaaaacaacagcatctggagaccgactaggcttagtgggagctgcaaaggaaatgatctgattcagtatgatgcaatacatcaaacctgggtgacctgggaaatttgcaatgcctcttgcagaatggggaaacccatgggggaaggcaatctgatggggaagttggcaatttctggtttgggtgatttaaatgtgaaagaacatagatatccaagtaaatacagaattaggtcacagaaactgagagactcattgtcaataaaactgaatgtttttaagttaatttaaaaatgaaatagacacatgtactgtaatttctatccagttcatcacaaaatttttattcatttttgtttcttttaatgagtggaacattataggagctcaactgtatttgaaaaatttacttttctaagatgaggagtgaatacatgggcattttccatgttattctttattcattcgatatgtctgggacaatttataatatattaaaaattttaagttcacatcacatgctaacccacacatatttctctctctctctctctctctcacacacacacacacacatacacacacagacacacactatatatattttccttagatcagatgccatcttatttccagatgctagtgctagagattcccatttgggaaaaaacaaaagaagaaaaataaagaaagaaacctaaactaaaccacatattttaatcttctctttagatattgaaatgcagactatagagaaagaacttactgcagcatcagcaaaatataggaaaagtgtaagtcaaacaggaagacataccaatattcacatgataccaaagaagtgcattttattacctgtatttaccaatgattcagtcagaccgaagctcccaggagagtttatagcacttagtgggagagacaaaaatggagaaacaaagaattatgaacagtgtgatgtttccagtagaatcagaggcatagggagaacaaagtactcaaaggatacatcctagagaaagtgactatgtgtccctgggaggttgtctaagcaagctcggctctggaattggagtagattggattggagtagattggagtgctagcactgagttgggcactattagctttgagacttagaggaaattattaaattgcataagctttagtatgaaaatatttttattgataaaaacatgttaatagtagctgcttcccaggattgcagtgagggttaatgcagaataggacccagtgaatgtcagctcctcttactgtgtagcgctgaccaatagacccccatctgccctccacactcagcactaccccccaccacatccacgtttctctcttggatgactttcaaatactgttgccatcttaagctctccatactctaactgctttggttataatctcagccaccagacaagtagatgtccttcttcttaggcctttgaaagccacaaccctggtctccaccagccttcgctcatactaaagcctttctggagcatactccatgcttcctttctattcatttcagaggcctttaattttctgattcttgtttagctctacaactattacatatccaccatattacctatctttatttaccatagacgtcattccaaattgtatcctgtagtcgttttaaccaagtaaaaaatgaagttggaaagagtatatatgttcttttatttttttttacacaggaaaataaatatgataataaaacttctaaaattcttttaagaagaatgttttggatgtgtgtatgagggcaggatgaaaggggataatcattagataacataagtcaaattcacaggtagaaggaggctgtcattgactttcagcatctattattgtggctattcagtgaatacactccgacctgggggctctgaactagaggaaagccaggtgctcctgaagccaggtgcctgctttggatgaatgaatggataaatgaatgagataagcacaaatctacagtacacccaaagattacataatcaaaaataatgcctgtacaaagaatggtgtaaattgcactatgaagataatttaggtaaaaacttagctaaattttcttaacaggaattccatttttagtgctttttttaaactcaaggatagaattcatattaaataggaataaaagttaatgccaagtataacttctttttgctaataattgtttcgtaaatatatgtgttctgtaaactaacataaccctcatttttttttgcagttgtttcatgacctttgcaaacaaatgaaagacttacatttgctaagttccctttagtacttaattactagaaatttaaggacctaacagggactgcagctgttctgagtttcaattatttttctgcttatcttcctggctaataacttggagctctgggctgaatgcattccattttttggtaatgggaaacatcaagacaaatcttgtttcccacataactgagtggaacaaggagaattgggtcacccaagagtttcatcagcactcttggaagagctcaagagataagcagaagcatttacactactgggaacaattggttttgtcaagagactcagcaataaaagcaggaaactaggctggaacagaaggggtggtgggaaagactatctgaatggtaaagggtttctgtgtaaaataatgatgccttctcttttaggggaagctgagcatttttgttttggcacctagatgttgaatcatatgtctcacatagaatcatagattttgcagagttcgattagacataaggcatcacctagacttctttaaagctggggacaccagggcccagagaggttaaaggacttatctgaaggcacacagctagtacgtggcaggcacagctagtacgtggcagggctgggaacagaacccatttcctattcccagtcagggcacttccctctcccctacatctgcttcctctactcctttaagcatcttgtctcttcaagccacagctcaagtactctggtgatattctcagcacaatctccagattgctattcttgaaacctatttctttggcctccttctctcctaattttttttaaaaatcatgcttttgtaaaattattaagttttctggtaaagtcgagcactgatggttgagaatttattgcatttggacaatttctagatggcaacttatgtatagttgtacgttactgaattaaggtgtgtttagataataatgcagctggaaggagctatttggatcgaatgagccaaatccctggtttgcagattatggaacaaaaccctagaagacaaagggatcatcagtttaaaatacaaaaccctaatgtcatagaaaattctatcaaagcaaagtttaagtgtttgaacattgacttcatcaaagattaaataaaaatggtcctgagttgttattactctctaaaaaagtgttgtttattaaaatgtttggcatatattgttgttgttcattgttttactcatttggagaggttctaataagaatagcaggaaactaactgaattatttaaaagctaggctcaatgtattcaaggaaaccaaaagtttaacgtactttgagcagcacttgatgaaaatgatcatcaacatgatgagttgtattttaggcatgcacagtatttgctaaatgaatgaataataaatataaaaagtacttggctggagacaaagtattgtaccttagaatactgacattgaacaacacaaatttggtaaatccttactttttttaaaattatactttaagttctgggatacatgtgcaaaacgtgcaggtttgttacataggtatacacgtgccatggtggtttgcttcatccaacaacccgtcacctaccttaggtatttctcctaatgctatccatccccaacctccccaccccgcaacaggccctggtgtgtgacgttcccctccctgtgtccatgtgttctcattgttcaactcccacttatgagtgagaacatgtggtgtttggttttctgttcctgtgttagtttgctgagaatgatggtttccagcttcatccatgtccctgcaaaggacatgaactcatccttttatatggctgcatagtattccatggtgtatatgtgccacattttctttatccagtctatcattaatggcatttgggttggttccaagtctttgccattgtgaatagtgctgcaataaacatacatgtgcatatgtctttacagtagaatgatttttaaccctttgggtatatacccagtaattggattgctgggtcaaatgatatttctagttctagatccttgaggaattgccatactgtcttctacaatggtggaactaatttacactcccaccaacagtgtaaaagcgttcctctttctccacatcctctccagcatctgttgtttcctgactttttaatgatcaccattctaactggtgtgagatggtatctcactatggttttcatttgtatttctctaatgaccaatgatgatgagcttttttcatatgtttgttggctgcataaatgttttcttttgagaagtgtctgttcatatccttcccccactttttgatggggttgtttttttcctgtaaatttaagttccttgcatattctggatattagcccttgtcagatggatagattgcaaaaattttctcccattttgtaggttgcatattcactctgatgatagtttcttttgctgagtagaagcttgttagtttaattagatcccatttgtcaattttggcttttgttgccattgcttttggtgttttagccatgatgtctttgcccatgtctatgtcctgaatgctattgcctaggtttcatggtagcgtttttatggttttaggtcttatgtttacgtctttattccatcttgagttaatttttgtataaggtgttaaggaaggggtccattttcagttttctgcatatggctagccagttttcccaacaccatttattaaatagggaatcctttccccattgcttgtttttgtcaggtttgtcaaagatcatatggttgtagaagtgtggcattatttctgaggactctgttctgttccattgctctatatatctgttttggtaccagtaccatgctgttttggttactgtagccttgtagtgtagtttgaagtcaggtagcgtgatgactctctcaactaaagttgagagtcagttgaaaactcatggagaaactgagtgtctagaacaaatatcttaaagaacattgtcattacctctctgggacaactttattcacagaagaatttgagaaataatagttcattacatactaagtgacatcacaaatgataaaaatggggtgttcatagtatttagttccctgcaatttaaaacccatatgttggccttttaataactattttagccatattaggtgcatgggtagactccaggaaccatctgctatgtgcctgccaattaagtttgctgcgttctcctgaacagagtgactcttccattaaaacaagtggcttttccaggaaaaaagatcttgggattttctttggttattagatagctctacaccagataggaacataaaatttctttgtgtggggaaagaggagagctttcctgaagtttgactcatattacaaaaatgagggggaaagggatttaagtgcttatttcagttccttttccaaacatggaaagtaaaatagtagttcagcctcaatcctttcagaggaagatctcattgcaaatgtaaacttcactactcaactcacagtgtttcatatattgcaaataacctagacttcaaaattcaaaatgccacatgcaaatcctagtttaagtctggaagtgtttgtgagatcaaaagcaaaaaaattttctctgtggtcttagattcccatttaaccttatttctttttaaatgtctacattaggaagtcccatgttttatccttgtaattctaaaacagatgagtaaatgagtattgcattattatagttggccacagagcaaactagtggcagtaacggagcttaatcgtgacctttaaatttcaaacatgctcagattcttgaagtcagatggcctcatactttgctttgctgctgtgtgatggaaagggatcaagtatacttgacttttgtaagtgactttctttaaagctaaaagttgcatagaacacatttgttgaaacaattagaaaactttatctgtaattctctttgcaaattacatgattctgcaagcctcattgttcccagtttctgaaatgggaataatcattcatcctgcatatctcttctatttattataaaagtgaagataacttaaaatattataaattaatgtgtaagtgtaagaaaatattaactgtggagtgctacactttctgaccttgtgaacgtttgattttctttaccggaaacactgaaatatactgaatatcaggtacctctccagagcatgcatgtggttctacagttgcttgcctaaaaatggtaaaggtcaactatccagaggggagaaatggagaggacagaaatgctgttaattaattagcataggaaacacatagagtcatagagttttctgtcagctgaggaagtgccttctctcctctttctcacacatgcatatatgctcacatatgcatcaatataaatcctttgattctttattgttgttcaaactagtaagaatctattactttctttttgcattttgatgctccagttgtcgcagatttggccaggaaggagccccttcaaattttcctctttggtctattgacatgtctccattgttttttttaagtccttcttagtttttgcccaagatatgttgggctcaactgtactttcctttcccaagccttggaatcagccatctttctaaagagtcctagttccttttcatagagtaaggaatatagaaaccaagattttcatgctaggtgtactcattgatactggagtgttgttatttttaggttctttcagagaataggaggaaataagagaaaagaggtagttagtaaaaaaaaaaaaagagtatatctgtttgttgataagataatgaatgattcttccaagcagaaagaacaaatgtgtagatgggggggtgggcagggcttggcaagagagaagaaaaagaaggaagaggaagagaagaggaagagaagaggaagaagagaggggaagagtggtaggggaggaggagggagaggcaagaagaagaaaggggcagggagagtgagaaagactttcttaaagtacttctgtgtttgtggagcacaggtttaatcttgtgggaagtataatgcattgacctggagatgtagagaggaaccacaccatgaagggccctatgtgccatactaagatacagatgctcctctacttatgagggttacattccaataaacccattataagtctaaaatattgaaagtaaaaaatgtatttattgcccccataaatccatcgtaaagtcaaaaaatggtaagttggtgatagtctgtatttgatttattacaaaaggtgaaggcttttaaccaaatcacctcattgacgactctaataatgggaatttcaagcaagaggttcaagtactaagaggggccatggtggtgaggcaggaggacataccatggggcagattagttcttctagctctgcctaaatctcacttctgagatggtgaattacttgacatcctggacttcacaccctccttccttccttttctttcagtcatcctgttttggttttctgccatctaatctgagggaatttagaaatgaatcactgattcctgctttctagtagtgttcacagaatatattttaaagatggaagcatggaaagataaataacaaaagcacaaggccatgctgtctgtcatccatcctctttattggtgtgtaggcactgaggacttacttgcttaatgtaatttataataagtttttcatcaactatgaaattagtcatagtcatggctcttatgtcctaactcattgcaggtatcagataatggacttaaaatatgtgttgtctcttatgtctctgtattcaatagcaatttatttttctctggttttgcctttatgttagaatgtgtataataacaacataccctttatttgttgttctcttgttttggtagtgtcgaattactgggttgcagaatatgcatattttccactttacaagataatgccaaatgtcttccaaagtgactaccagtgggcactcccattagcatgtatgcaattcccaacatttggtattgttagacttaatttttgtaagtctttttttttgtgtgtgtatatgtgtgtgtgtgcatcttcatattttcttatttttcattctctgagtattagtaatattaagccctttttctatatatttatttgccattcagtttttattcttctgtgaaaagaaatttgtttttccccatggttctctatttgtttgcttcttttcttatgtatttggacaagtttttaaaaactttaaaatttaaaaaatatttgtatatttgaaaacaggagctcaaaccaatacttgtacaaaaatgttcattgcagcattatttataacagccaaaaagtaaaaacgacccaagtgttcatcaacagaggaataaacaaaatatggcatatgtgtacaatagaatatcattcatcaataaaaagaaaagcattctgatacatgccatgacatgaatgaaccttgaaaaaattcttgtaagtgcaataaaccataagcaaaatgagatatattgtataattctacatatataaagtatctacagtaggcaaattcatagacaaaatgtagatgagagattatcaggggctgagaggaggagagaataaggaattaactgcttaatggttacagagtttctctttggaataaataagttttggaaatagtgatgatggttgcacaacattgtgaatgtaattaatgccactgaattgcacacctcaaatggtaaaaataacaagctttatgttttacatatattttaccacaataaaaataaatagataggtaagacatatttgtgtgggtctacttctgagctctctattctgttccatttatttatgtgtctatccctccaacagtaccgtgtttccatgatttctgtcactataaaatgtcttcaatttgtgtagactgaattctcccacttagttttctttttcaaaagtattttagctattctagttccttttctgtataaattttagaatatcttatctatatccacaataaaaatacctggaatattgataggaattggttaaacctgtattattatgtcttcttcgtgggttgacacctgcatctttatgtttctgtatcctttttaggttttctgtattatagtctaatttgtcttatttaaataatactgccctagctctcttatgtttagttttggatggcatatcatttttctttttttttcactttttaatactttttattttaatgatattctataagcttgataattaaatgaaatgaatcagtataacaaggttaaaaaatcctcagagtaaataaaaaaccaagtttaaaaaagtcttcctaagacatacatatcaatagtaagcactattccagtttataatattatctagagattttaatacacggactcaactctttcttattgtaattcaacttgcctcatcccaagttacattttttagaaaaatcttgatcctcatcccttccccttcttcttataccattttgcttctgccttacatccaacatttgccatgttttctctggaactccttgtctaatatcaacccagcacatcattgccctaaaatctcccctagatttctttcttacttcaataggctggcttaatgcaatccttccctttgtcttttctgttttttttaaaattttattattattatactttaagttttagggtacattgcacaatgcacaggttagttacatatgtatacatgtgccatgctggtgtgctgaatccattaactcgtcatttagcattaggtatatctcctaatgctatccctcccccctccccccaccccacaacagtccccagagtgtgatattccccttcccctgtccatgtgttctcattgttcaattcccacctatgaatgagaacatgcggtgtttggttttttgtccttgcgatagtttactgagaatgatgatttccaatttcatccatgtttctacaaaggacatgaactcatcattttttatggctgcatagtattccatggcgtatatgtgccacattttcttaatccagtctatcattgttggacatttgggtttgttccaagtctctgctattgtgaatagtgccacaataaacatacatgtgcatgtgtctttatagcagcacgatttataatcctttgggtatatctccagtaacgggatggctgggtcaaatgctagttctagttctagatccttgaggaatcaccacactgttttccacaatggttgaactagtttacagtcccaccaacggtgtaaaagtgttcctatttctccacatcctctccaacacctgttgtttcctgatttcttaatgattgccattctaactggtgtgagatggtatctcattgtggttttgatgtgcatttctctgatggccagtgatggtgagcattttttcatgtgttttttggctgcataaatgtcttcttttgagaagtgtctgttcatgtccttcgcccactttttgatggggttgtttgtttttttcttgtaaatttgtttgagttccttgtagattctggatattagccctttgtcagatgagtaggttgtgaaatttttctctcattttgtaggttgcctgttcactctgatggtagtttttttttgctgtgcagaagctctttagtttaattagatcccatttgtccattttgaattttgttgccattgcttttggtgttttagacatgaagtccttgcccatgcctatgtcctgaatggtgctgcctaggttttcttctagggtttttatggttttaggtctaacatgtaagtctttaatccatcgtgaattaatttttgtataaggtgtaaggaagggatctttccttacacctttcagctttctacatgtggctagccagttttcccagcaccatttattaaatagggaatcctttccccattgcttgtttttgtcaggtttgtcaaagatcagatagttgtagatatgtggcattatttctgagggctctcttctgttccattgatctatatctctgttttggtacaagtaccatgctgttttggttactgtagacttgtattatagtttgaagtcaggtagtgtgatgcctccagctttgttcttttggcttaggattgacttggcaatgcgggctcttttttggttccatatgaactttaaagtagttttttccagttctgtgaagaaagtcattggtagcttgatagggatggcattgaatctataaattaccttgggcagtatggccattttcacgatattgattcttcctatacatgagcatggaatgttcttccatttgtttgtatccttttttatttcattgagcagtggtttgtagttctccttgaagaggtccttgggcaaaaactggttcaacctatgcaaatcaataaacgtaatccagcatataaacagaaccaatgacaaaaacgacacgattatctcaatagatacggaaaggcctttgacaaaattcaacaacccttcatgctacaaactctcaataaattaggtattgaagggacttatctcaaaataataagagctatctatgacaaacccacagccaatatcatactgaatgggcaaaaactggaagcattccctttgaaaactggcacaagaaagggatgccctctctcaccactcctattcaacatagtgttggaagttctggccagggcaattaggcaggagaaggaaataaagggtattcaattaggaaaagaggaagtcaaattgtccctatttgcagatgacatgattgtatatctagaaaccccatcgtctcagccccaaatctccttaagctgataggcaacttcagcaaagtctcaggatacaaaataaatatgcaaaaatcacaagcattcttatacaccaataacagacaaacagagagctaaatcttgagtgaactcccattcacgattgcttcaaagagaataaaatacctaggaatccaacttacaagggacgtgaaggacctcttcaaggagaactacaaaccactgctcaatgaaataaaagaggatacaaagaaatggaagaacattccatgctcatggtttagtcttgggatggtgtatgtgtcaaggaatttatccatttcttctagattttctagtttgtttgcgtggaagtgtttatagtattctctgatggtagtttgtatttctgtgggattggtggtgatatcccctttgtcattttttattgtgtctattttattcttctctcttttcttctttattagtcttgctagcaatctatcaatttcgttgatcttttcaaaaaaccagctcctggattcattgatttttttgaaggtgtctttgtgtctctatctccttcagttctgctctgatcttagttatttcttgccttctgctagcttttgaatttgtttgctcttgcttctctagttcttttacttgtgatgttagggtgtcaatttcagatctctcctgctttctcttgtgggcatttagtgctataaatttccctctacacactgttttaaatgtgtgccagagattctggtatgttgtgtctttgttcttgttggtttcaaagaacatctttatttctgccttcatttcggtatgtacccagcagtcattcaggagcacgttgttcactttccatgtagtcgagtggttctgagtgagtttcttaatcctgagttctagtttgattgcactgtggtctgagagacagtttgttaaaatctctgttcttttacatttgctgaggagtgctttacttccaactatgtggtcaattttggaataagtgcaatgtggtgctgagaagaatgtatattctgttgatttgcagtggagagttctgtagatgtctattaggtccgcttggtgcagagctgagttcaattcctggatatccttgttaactttctgtctcattgatctgtctaatgtcgacagtggggtgttaacatctcccattattattgtgtgggagtctaagtctctttgtagttctgtaaggacttgctttatgaatctgggtgctcctgtattgggtgcatatatatttaggatagtgagctcttcttgttgaattgatccctttaccattatgtagtggccttcttcatctcttttgatctttgttggtttaaagtctgttttatcagagactaggattgcagcccctgcctttttttgttttccatttgcttggtagatcttcctccatccctttattttgaacctatgtgtgtctctgcatgtgagatgggtctcctgaatacagcacactgatgggtcttgacactttatccaatatgccagtctgtgtcttttagttggagcatttagcccatttacatttaaggtcaatattgttatgtgtgaatttgatcctgtcattatgatgttagctggttattttgcgcattagttgatgcagtttcttcctagcatcgatggtctttacattttggtatgtttttgcagtggctggtaccagttgttccattccatgtttagtgcttctttcaggagctcttgtagggcaggcctggtggtgacaaaatctctcagcatttgcttttctgtaaaggattttatttcttcctcacttatgaatcttagtttggctggatatgaaattctggtttgaaaattcttttctttaagtatgttgaatattgtcccctactcccttctggcttgtagagtttctgccaagagatccacagttaatctgatgggcttccctttgtgggtaacccgacctttctctctggctgcccttaacattttttccttcatttcaactttggtgaatctgacaattatgtgtcttggagttgctcttctcgaggagtatttttgtggtgttctctgtatttcctgaatttgaatgttggcctgccttgctagattggggaagttctcctggatgatatctggcagagtgttttccaacttggttccattctccccgtcactttcaggtacaccaatcagacttagatttggtcttttcacatactcccatatttcttggaggttttgttcatttctttttattctttttcctctaaacttctcttctagctttatttcattaatttgatcttcaatcactgataacctttcttccagttgatcgaatcagttactgaagcttgtgcattcatcacatagttctcgtgccatagttttcaactccatcaggtcatttaaggacttctcttcactggttattctagttagccatttgcctaatcttttttcaaggtttttagcttctttgcgatggattcaaacatcctcctttagcttggagaagtttgatcttctgaagccttctcctctcaactcgtcaaagtcattctccgtccagctttgttccattgctggtgagagctgcgttcttttggagggggagaggtgctctgatttttagaattttcagcttttctgctctgtttattccccatctttgtggttttatctacctttgggctttgatgacggtgacgtgcaggtggggttttggtgtggatgtcctttctgtttgttagttttccttctaacactcaggaccctcagctacaggtctgttggagtttgctggaggtccgctccagaccctgtttgcctgggtatcagcagcagaggctgcagaacaacgaatattgctgaacagcaaatgttgctgcctgatcgttcctctggaagcttcatctcagaggggtacccagtcgtgtgaggtgtcaatctgcccctactgggtggtgcctcccagttaggctactcgggggtcagggacccacttgaggaggcagtctgtctgttctcagatctcaaactctgtgctgggagaaccactactgccttcaaagctgtcagacagggacatttaaatctgcagaggtttctgctgccttttgttcggctataccctgccccgagaggtggagtctacagaggcaggcaggcctccttgagctgtggtgggctccacccagttcgagctacccagctgctttgtttacctactgaagcctcagcaatggtgggcacccctcccacagcctcgctgctgccttgcagttccatctcagaccgctgtgctagcaatgagcaaggctctatgggcatgggaccctccaagccaggcacagtatataatctcctcatgtgccatttgctaagacccttggaagagcacagtattagggtgggagtgacccgattttccaggtgctgtctgttatggcttcccttggctatgaaagggaattccctgactgcttgcactttccaggtgaggtgttgcctcgccctgctttggctcttgcttgacaggccgcacccactgtcttgcacccactgtccgacatgccccagtgagataaacctggtaccttagttggaaatggagaaatcacccatcttctgcatcgctcatgctgggagctgtagattgtagctgttcctattccccagctgaagaacttttaacattttttcataataaattcctgctgttaacaaattctttcagcttttgtttgtttgaatttttttactttcattttcaaggacatttttgtggatatagaatgatatagtttccttttcttttctccctccccagtacttcaatatttctcttgcttgttgttgtcttttgttcttggggtctgtggtttgatatctttcattgtttgagagaaattatcagccattttactttaaaatgtttttctgctttatctctctcttctccttctgggattccaaggatagtatataagaccacttgactttgtcccagagttcttgaatgttctgtcctcctttttttttttaaccatttatttttatgtgttagctcagtttgggtaatttctattgagctatctttaaaatcactgatatttttcttcagttgtctgaagtctagcagtacatccctcaaaggtgacctttttacctggtataatttctgtttctttctttcttttattttttatctatctgctgaaattccaccatctgtttatggatgctggctatatttttttgctagaaactttaatacattaataattattgttattttaactttttcttttgtaatgattttaggcttacagaagaattgcaaaaatagtacaaagagttcctatatgtacttaacccagcttcccctaatattaatatctaatgtaagtatggtacaatgatcaaaataaaaaattaagattggcacagtactattaactaaactacagaatgtattcaaatttcacaatttttttttctactaaagtccttattttgttccaggatcccaacagggtgccacattacatttagttgtcatgtctctttagtctcctccaacctgtgtcaatttctcagtctttcctttcctttaatgaccttgatgcttttggaaactactattcagatttttgtagcatatccttccattttttgttggtggtagttttctccagagttgattgagaatattgattttgtggaagtacgccactgaggtgatgggcttttctcagtgcattatatcagggagttcatagtatcaatataatttattagtgatgttgactttcatgacatagtttaggtggtatctgccaagtttctccactgtaaattaatatttccttctttataattaataaatattttgggggagacatttagagactatagagatatcccatttctccttaaacttttgtccatgaattttagcattcatagatagactttatctgcagcaattgttactgtaatgttttgatagtcattttctctttttttcattttgtctacatttgttgactggaattattttgtaaaggtgacttctcccttctttgtttgtttgtttacataatatggacccctggtagcaccaatctgttttccatctttataattttcccttttccatagtgtcatataaatggaataatataatatataatatttggggttatttcatttagaaaaatacatttaagtgttgtccatgttgttattattttgataagttactcctttttactgttgtattatcccactgaaggtatgtaccattttttatccacttatcagttgaagaatatctaggctaccagttttagcactatgaatatagctgctgtaaacattcatgtacagacttttgtgtgaacacaaatttttaatacatttggataatatgtaggagtaggattagtgggacacatggtaagtacatatttaactttttaaactgttttttgaagtggctttatcattttgcatacattttgaaaattccagttgttacacatctttggtattatcagtttttattttttaattttagccatttcactaggtgtataatggtatctcattgtgaatcatagaaattttttgtttgatgtattaaacacctgtgtcataactgaatattgtcctgttgattgctttgtttcttgacagtcagttttttctttttctttccctttggaaaaatcttataataattgattgaaatcaagacataatatgtaggatagtacagactgagattattattactcgtgcctgaaaatgggcacagcttttcttctcctaggtctttgatatggggtttaagtttttctggttaggagccaagctgggtttaggtggtgatgttgctacgattactcttaatgcatcactgtcttccaatgtttctagcattactttgtgatcagggtgaggactggattgctgagggtttttcataatgttcatatttcactcccagttttagactttcctgtgcacttcagagatgtctctctatgctcttgtctgtcccaaagtggtaaactgatgttacatgttgttcaagacttgctagcttggtggtggaagaatggtagacattttctgtgattctggttcagcctcagtcttaggcaagccatgtgcccctaggtcttagtgtttagggctttctcagtgatcgtgtctccccagtgttagaggctctctctctctcttttttttttttttttttttgagatggagttttgctcctgttgcccagaccggagtgcaatggtgcgatcttggctcaccacaacctctgcctctcaggttcaagtgattctcctgcctcagcctcccaagtagctgggattacaggcatgcaccaccatgcccggctaattttgtatttttagtggagatggggtttctccatgttggtcatgctggtctcgaactcctgacctcaggtgatccgccctcctcggcctcccaaagtgctgggattacaggcatgagccaccatgcccggccaaggctctcttatgttctatgtccatgctagtttcaacctcttactccagggtagtagtcaattttgttccgcttccttcccctggccgcaataagttttcacttgtgcctttgaatgctggggcctgggtgaaggaagcaacgtacctagggcacaatatttcaggaaatcctcactctcagatttgtgcaaatgcaaagctggcactgcacaaaccaggaagtgaatgcctttttctattttgccccctggatgctttgcttacctcaccggagtcctggctttggccctaggggtgacagagttttctgctcttcccctactggcttaaggctttttatttaataggaagaagaatttggttaggacttcatgcctttccacactggcatctgttcttttctccagacttacacacaagggagatgttccaggtcttctttcctgccccaatactgcttatgagcacccagtgagatctgtggacaagaagagcctatgagtggatacaaactcctattgtgtctgtgattccaagaagatctatactttcactctattcttcatcttaacagtatctcagatattatagctgaaattttaccaactcctttgctaacgctgtctttttcccatgcccttacccaggtaagcctgtctgtggaagcacttatctttgcttagatgtcaggctagtaggtagccccaggtttttagttctaatggcacaggaaaaaatacgacttgcaaaattatctacatttttcttgttttcttgttgctagtataggaggaatgctctttctagctttctatagcttacgtagaatttttcaatactttaaatatgtcattttcttgtcttctggtttgcctgtatttttacataaggagtcagaactcactcttacctttgttcctctgtatgtgattattaaaaatatctgcttttataattttctgtaatttttctcataactttaacattagtgttcagaaatttgattatgatcttccttggtacggttttatttgtatttattttgctttggactcagtgactttcttagatttgtgggtttagtttatatttttcaccaagtttggaatttttcagttattatttctctaaattttttttctgtaccctcttcttgcctatttcctcttgaactctgtaaatatgatagacctcttgatgttgttccataattctgaagttttgttaaactttttagtctttttagtttttctgtacttatatttgaaaaatttctgttgcttacctttttcttctgtttcttgtctgatgtttttcttctgttgagtctaacaagttcttctacttgtccaattatttagtttttttatttcatatgtattaccccagacatttcatttgattatttttatatctttaatccttatcattattatatacgtttctaaaaaatccttgtacataattgtagtagccatttttacatccttactgcaaaaaaatattgtgtttttcattcctttgtctgtttctcctggacagattttaaatttgactatgggtcacatttttcctgcttcttcacatgtctagtagatatatataatctatatttgccgaccacagcagattataagataacaattaacaataagagcaatgttaatagcataaacgctattagaaatcaaaagtggtattgacaacaaaaataaataaatacaggaaaaccagacaccttaaatataagaacttaagaagcacaattatttgggagcatttatctcaggatcatctttataactccaaatgataccctttcttagcacagcataattattgatgattaaaatgatgacttgaaaagtcagaaaaaatgtgttacatgttcagcactctcatttaaaaaggcagcgaaatgtgaaccattacagagattcctgccttttctctcttctaggtgtttgattccaagtttcttcttgcctcaagggccttgataaggccttgtctgctatgtggaaggctctttttttcctttctctttacctggctaatttctgtttatctttctagttttaacctaccattacttcctcaaagaagtcctccctgatttttcagtcaatattaagtttctctgttatacacactctcattgtaccctagacatttcatctatggagcttagtcataattatagcaatttccacattcatttgtttggtgtttatcaacaccactatactatgaactccatgaatgcattgaccgtatctgttttagctattgctaaaacattgcccagtgaatgatagatttcaaaaaataacttttcgaataaataatgttcaaccaaaaacagaaacaaatgtcaacatgttgcaatacatctatgagacttcggttttagtaaaagcatgcagtacgactaaattccttatatatgcgtttatttcttcttaatacctggtaacagtgtatgtgctaaatatatgttgaagaaataatgctaaacgacaatgaatcacattggggttatttttccttatagccagtgcttttcagcacctgagagttgacagtaactggatattttcacattttaattacaaatttaaataggcatctattttcttttaaaatagagaaagatactttaaaattgtatttgttgtcagatgcaacaacgttgcaaatatagaaaaatgcaacagtatgtgtttaattagccacttcaaaccccacagttattcccattttacttttttggatcataaacactctgtagagtcaaactaccacaagtaagtacatttgtctcaccaagtattccccacatggaagctgatatattctataactaatgatacccatttggtagctagagacaaaaatgtgtttcctgggagaaaaaaaaaaacaacaaaggttatgttttaatgtaatggaagattagaaatcctaagcaatttgcttatcaatcaaaacattggaaattttgaaaaaaggagctgtctagttaacagagttttcacctggggctcattagtggttctaaaagtgggtctttctctagtttctaactaatgtgctgctgggagttaggccaggtgttccttacactgatttccactcaaagcaactttatctgaaagcccatcaccttcacaccacacaagtgcaactctgttcactggtttcagtaaattagctcagtctctactactgtgcaaagaccaagatgagtggctggtttcaaataataagcactgaggaccctaaattattttgccagtttgtcttttgttaatgggaattcaagctgttcaaattcagttgttgttttcttttttcctttttaaaaacttgtcttgccatattgaaggaattaagtaagagtcctcttagtcactttaacgaatttgttgagcagttaaagcagcaggataatatttttaaatgaaaaaatttaagtttacaaccatttagagtttacaaacaatacctatttgtcttctaccatgtctcaatgagagtaactgtcactcagcatggcagaggaacttgccccaattcagtctggtttctcctttcaaacttccccacagttttccatagctagagcagacttccattcctcttgtactatgccttgctgagacatcccttgacacattctttcctttaatttaatgtaagacctggccttaaaatctttctgtgttatagacttccttttgaaatcttgggcagctctgaaaacagaaaacataaaactgcaccagactgtaccaaaacctgtcctgagggcgattcagcaggtttgattatatgccaagtacctgtgaataccccaggctgaagagctttcataagccattatgaaaataatgtaattttagtgatttagggaaatgggaaacaaggaataaaggatcataagggggagacaacctacaactccagggtaaacagggagtcagagaaaggtagaaagaaagaagcttaagacaggtaatggcagaatgaatatattataattctgaaagcgaatttcagtataatgagtgacagtatatttcagctgtgtcttctagattagatcaggagaatttaattcatatggcagagaagagaattgtgtcctgtgtacttagaagaggacatgggtttctatcttctttgagaaagcagaaagaccattttcacgatcactgattatataaagacctgtattagactgaccacatcctgatgcacgtggggaggaaatgcacttggcatgtggaataatctgggaccataagtatcctcttgctagagaggatttgtatgttttcctgagtctcttttaaagggcaataaaatttttttcacttggaagttgcatgtaatacattctgggaatagtgccttgtcgttaaatattgagtaatttatggtatcaagaagaaccaactcctaaatttgttcattttacttccactatagtgtccagagaggatggtggatagtgttttcaccagatgaggcctttttttggggtactgatttatatgactgccctgatgggtgagaaagaacttagcaagactctccctagctgtgtgatgctccctgtttaccatcagaacaaggaatgactccacatcccatcccatttctcccatgatcagggcatctgtgttctagagagacccatgggcttcctcttccataaagtagctgcgggcatacctcttaccttgccttaggcttctaaaatactaaatgcacatactgaatctacttgctcctgttactcttagagaaatgagacagtgggtaaaaatccacctccttgcttccaaagagagagtggttgtttgtgtttggaatattaggtcaatctaggagcaacactgaaatccattcgcctgcttgaccaattaggatagcataggatgtggtctatacagtcagtcacaaagaaccatcatcaacagatgatcttgtttaattgtaaaggacttttctctcacgtacttttaaagtatttaaataaccctctaagagtggataactatcacccaggtggtttttctggatgagttggatgaaggtggtagaaatcatttatataaatgtatttgaaaaaccatgaaatcacttttcccccataggcctgtgctgaaaccactttctggttgttaagccttaacaaacaaacagaaaccctttcaagccactgagaaggtgttatagttatggtatggcacctgtagttaaagatataggggctatacaatttggaactagaaattaattcaataaatctcataaattttgctgatgtttgggtccaatatacagtccatgatacattaaggaggtaaacactggatttaattgttcacttcagaaactagttgagctgtttctgctgctcctatcagcctttggtaaaaacacacatactcgatcaatctaaaatatgggtgatttatgatcctcagcaggtatttatttgagaaggaaatcacagcaggtcctggttcatactcgtatatggccctcacaaaactcagcctactgactacctttcaaaaaattatacatgtgtaactccagtccttgttttgcttttaatgataccaatgtaactgagaccttccatttacctggtttggtaacctgtaagtgggaccataggttctggttcaggaagtcaaaatctcaaataaaaactaggtatataatgaactccctatttttggatttgcggcagacagaggcaagcgcatagttttggactatatcttgaagctaaatctcctccttagagaggtaatatgagtgtaggaaaagtgaactttgctctgtgagaggctgtgaatgtccctaataaacttgtgtccaaaacaaaagagaaaaagagagaaagaatgaaaagaaggaagggggagggaaggaaggaggaaggaaggaaggaaggaaggaaggaaggaaggaaggaaggaaggaaggaaggaaggagtgaacacaggtcttatcagggtcttatgctatttagtgttcctttttagtatttcttttgaacaacaacactcaggaattaaataatattctctgtccagcatgtttaatgtgctttcattcctgtcctatggctttctccatctccaagttatgaattatttctgcagcccactcactttccaccctaactttcttacttctgttattctgctcttacagctttctgtctaaatatttttttctttcttcattctctatacaaagagtaaaattgtcctcatgagtttcacatgtgactaaatttttaactactatatgaatttttgttgttgacttttataaaactagtttttacttgctattaatttaatatgaaagctatagactatagcttatttggaatattatttggaatattatattatattacaagaactaggaatttctatgaaaaaccccaaagaaaaaaagagatcctgaaaggtcaaataggtaactagattacaatgaatatattaacaagagtggtctaatatttttcaaagtagattaggaagaggatgcaaccttcaggaatcatccccgctaagaagagactgtcatagcctttgccattttcaaccagttccttacaatatctggggtctgataatttcaagaaaatgggaatctgtttggggttagctttgggatttgtggcacatttttgtaagtcttagatcatgtaaaaagcttatcaatagtaatgaagatctctgtaatgagatttcttaatttcctatgtgatttccttctggttgcgaggattgtttagaaatacatgacttggcttctattttttattttaaaaactatcattttattactaactcatagttttattttatcataagagggaaactaaattctgtatgttatctatcatttaagatttatttagtcctaagttttgagttccttatgtggctaatgtgtggtttgctcttgtaaatattccttgactattttctgtttgatatagagtattatacatgtctaaaagcttgagcctattaagtatattggcatttccttgatatctctacttagtttatgtctacttgattgaattagtttatgagacgaatgtgctaaaatctttagctataataattgatttttccatctgaaattctatcagattttctttttgctattttgaggctgtccatgtaggtttataatatcttctttttttctttgttcctttagccattatttaacatttccctttatgtcattatattgtgttgtgtagtacaattgctaccttaggaatcttttgatatacatttttctggtctatcttttttcttttattttcaacctctctgtgtcttctgttttaagtgtgtcccttctggacaatatattaattggtttgattttttgtatccaatatgagaacttctgtctcttaattagtaaatttgactcatatacgtttattgaaattacttcatgttagaatttatttcttaaatttcattttatatctttcctttccttttttcattttgaggtggctttccattggatagttcaagttctcgtctataattctaaaagttaaaccttataattttgtctctactgtggttacttgcctcaaactcatattcagttttattcacttttcttgaattcttaaacatattaaattttaaaaaataagaacctggaacattgtctccttcagcaccacattatattgatactgtaaaagtttatttacaggttgttgatagatatacttccttttgttactttgagccttactcgtctcattgttttgctttatcacttcaaggaatgataaacttcaaagtcattgatttcttttacaattaataacttatgaactagctcctaaatttttctcttcacattatttgaatactttctctaagagtgttttcaaggtagatctttgcgtagaaaatctgaggcctgatgtgtcactgagtatttgtattacacattcatattttaataacattttagcttgttatcaaattctggaataaagttatttttctttaatacgtacaaatattagtgtattgtgtatctagcattgctgttggtaagtctgatcgcaactttatttttattcttttgtagatgatctgttatttccttctgcatgcttttagaatctctcttggtatttgatattcttaagcctcacttcgtttgatatttttaagtctctattgttaaatccccccacttcttatctgtactgtttaacacattcaaatagaagtctttatcttttattaattttaaaaaaattatgttttttcaaagattttttcttctcttcatatgctttctttctggtactcttatcacgcatatgttggcacttctacatctgtcctttatatctattacttctctttgtctatattttctctttttacatatttaaaattttcttcttggagaattactgaatcaggctttctatctctttaaaattcttcaactgcacccaacctattgttcgtcccatctaccatgctctttatgtcagtgtttgtattttatttatctaatatttccactttttgattatttctggttcttgatttatgttacaaatattccctatgatctctcctttaaatattcttatcaggatattggaaattcttgattttcacaactctgcttcagtggcatatgtttagctttttgtcttctgaattaattgggcttctgatggtccctagaggtatcagctactcagtcagaaaacatacatggggaagaaactgaagttcatgccacaaactgtagcagctttggaacagaagggaccagacaacctcaaggagaatgggcccaaataccaaaaatttactcttggtgacccttgttgcttctactgtaccaggcaactctcttgggcaggattttacttttgcacacttagaaagatcctgcaccagggaaaatcggtctcctggggaggtattccagcaaccatgcaagtctggaggcgaaggggttggagaaccaaatgcccaagggcagctacttagccagcacccactacctgccttcattaattgttctcacgggcaggccttttgaaccaccctggtacagaacaccaaccctggtgctttaggctgtctgtgccatttctaggcaatgaacgagtagttactgtaccaactcaaaaaaaaaaaaaaaaacgggatgaaggacagagaattaaacaattccatccagcttatcctttcactgccacttgggtaacacacagcccccagctgcagttgctcagctcctaggcacatcagctcaatgtggtctgtagtgtcagcaggggaagttgtttctattgtttcctgcaatccaggcttctctttggctgctatggtttctccaggtttatttttagggaggaagctagcagtgtatgtaccatcttgacagtaaccagaagccatgaaaggagttctaacttgtgcctctgaggaaagtctctttttatatgctgctcaatgtcatttactcatcgaaaaggtatttatacagtaaattgctaggggaaaatgcctcaactttcttactgaactttcagaattcagtggtcagataataattgttgatttcctaacctttaaaaatgttagaaaaacttttcatgtgatgtaatgtgacatttggttatgttacaaatggcatgtggttaaaactgctgaacattattataattttattagtttcctatgttgaattgttatcacatattttgtcctacccaattatccaaatccttagtgactattaattactgaagaaaagcaagcatggccaagtcaatgatatatgcaggcactccttgctctagacaggatcataaaaatgactgtatgagctgaaaccatacatagtagtagtcttaataatcaatggggaaaaattatgattgttctgtgacctttaaaatttcctgtcaaaacactgaaatctcttttactgttgtttataaatgtataaggaaattaaaaaacatggtaaaagttttttttagtatgctgtaatttaaagcattagaaatgggacttaaagtgtttaatacttttgtaaaagaacttatgaagaatagtttgagcaatgtttgtcttctcatgtataacttatagtactaagtgagcatttttttctaggctttggtgaatcttgacagcccattctaagtttggatcagcttccaacattttatcctttgcactttcaaccttgtgaagtatctctgagtatccatttagggtaaagatttttaatggcatcagtttctctgggagatcttcatccttttcatcactacaagtttttgcatttctgttggtaacttcaccttcaccatgttcttctggctgcaaatctagagtctctccatcagtggcagtgtcaacattccataatcagctatttcttctagaactctatttacattcaatacaaatttcacttctagcatcatcactttttctatttgtgtgtgtgtgtggtgtttcactttcatatttgttggccagtttcctttactgattatccatttgtgtaaatatcacatgggtttacctctgggagacatggtcctgataccaacacacactttgctgtctatgcatgaactgaataactgagacgcagtgacccatcaccaacagactggaagaagtagcattagtggtccattgattatgataagcatctgctattaatgtaatgatctgtgggaaaagagctggcagcaaagtctgtattttatgcaattactcccacttaatataccgtgaaatttgttggaggattgttgttatttaaatcattgtaactgaaattcatacatatagaaagtatgcacagttaaactacccatctatattttataacaaggccagtcatttaccaactgggtgactgtggtggctataaaagtatgccctcacatgtctgctagaggaggtgtttgatggatggcttcaggtgctgagatttgagcctaccactgtgttcctgccaggcccacatttcccataggctgctcctggctaatgcctaatttttgcaatgtctgacttgggcaacttttgctcaaggattccccactagctgagctaaaacttttagaaatgcattccagtctgtggctcttcctatgtaaccctccttccttccctctctcctttacaggggttacacctgaatcccggtccgaaggctgtcccacctcctctaactctttcccttctggatatttccttcaataaatctgttgcacatctaacctcattttggcatctgcttctcaaaggttttttaatacaaataattctgagagtgggccaagaaaacaggagtaacatgaagtttggaactggatctgtcgccacctggcaggtgaagagaataccatcatgagtgccatggaagatacaggtagtccctggagtttaatttctcaggtggtgaactggagaaatgtccagatgaagtagaatgattacagatgtgatgatttgagcatttggaagaacacatacaaagtctgcagagctggctagttattgctaagttgtataagtgcccctcagaaggataactagaaagagggtcattaacaagcagttacagggtgacaaagaggtccttctctcttgtgctgaaagagtagaggtagttaggcagtagactgacgatccaatagagtcatggatgccagagacgtttgaatgctcggtcaaggcacgtctgccaggttaaggtcagagcactggttaagaaaacctgagatcctgaagttcaggttggggacaagacatcagttaatttattttatttgtttgtttatttatttagagatggggtcttgctatgttgcccaggctgaatttgaactcctgggttcaagcagccctcctgctttagcttcctcagtagctagaactgtaggtgcttgccattgtgccaggcccagggacaggaaatctaaatggttgactctgagtatgttgactctgcgcaacctccggagccacagagcttatgatgggggggaccaccctcttctagtacaagctagcactcctggttctggaagccactgcacaagctgctcggcagaggcaacaggtgcccctcaggggctgccccacccactcttctggctgccagttggtaaccagccagttgttaatctcatggtattgtccctccagtaggaatgatggaaaataatgataacacaagaagttgtgggaagacaaaggaggataacttaattcagtcttgatcaaaggagggatagagagaatagactactcagcaaaagtcaggcatgaattgggggtgtaaaccctggtggaagaggaatattcacatggaagagaagaggagagggaggggaattctacataaaaggcatggcatgtgcaggggcagagaggttttagaaaatacaacattttcagaagctgaaaacagttcagtatatcagaagcacaggcaatatcaaggaatactgagagatgagatacaggttgtgcaagtgtcttgcatgttatcatatttagcttttgtgaagaacagtatgagtaagcccaggatgaatttagctgtagagggagggtgaattacgtgattacactcatgtttatcaacaattacttagtgtcataaaattatgtatgcatatatgcactaatgtagttatccttcttttaattcagttggtagcggaaatgaagttgttagttttcaataaaaatgttacaggaaagaggtcccgatccagacccccagggagggttcttggatctcctgcaagaaagaattcatggcaaatctgtagagtaaagtgaaagccactttattaataaagtagagaaataaaagagtggctactccatagacagagcagcactgagggctgctggttgcccatttttatgattatttcttgatgatatgctaaacaaggagtggattatttatgcctcctctttctagaccatatagggtaacttcctgtcattgccctggcatttgtaagctgttgtggtgctggtgggagtgtagcagtgaggatgaccagaggtcacccttgtggccatcttggttttggtgggttttagctggcttctttactgcaacctgttttatcagcaagatctttatggcctgtatcttgtgccaacctcgtctctcatcctgtgacttagaatgccttaactgtctgggaatgcagcccatttcatctcagccttattttacccagctcctattcaagatggagctcctctgtttcaaatgcttctgacaaaaacattcacgatataaactttatttttaagattagatggaattagagctataaattgacgtggaactcgcccccttaaaatgtctgtggagattgtataggtggtttagaaaatccagtcaagttgaattcactagattttcatctgaatcctgttcctcaggaggccttttttttttcagtaggaagaccaatttttagtgtctgtttttcacagaactcttccagtcagtatttgttctaatagttgaaagagaatgactttagaaagttatttgtggaggctcagaagccacagggaaataaaaagatttgaaaattgttataaaaattaaaggttatggaggaaggacagctctgtaatacagagccttggatacatacacttcttcctggaatcttgacttcatgagaacctgggctgacagaaaataatgccttggacctcacctctgtgtgatttcttttttctacaaattggaaccaatatattttagaatacttgttttgtatttattttctttctttctttctttctttttttaagacagagtcttgtgctgttgcccaggctggagtgcagtggcgtgatctcggctcactgcaagctccgcctcctgggttcatgccattcttctgcctcagcctcccaagtagctgggactacaggtgcccgccgccacgcctggctaatttttttgtatttttagtagagatggggtttcaccatgttagccaggatggtctcgatctcctgaccttgtgattcgcctgccttggcctcccaaagtgctgagattacaggcatgagcctgttttgtatttcttagtgagatagcaaatcgttggaaagttggttccattaaggagctgtataaaagattaggatttattttaaatgttgttacaagggttatttgatgtttcagacctgaagatccaaagcaacacaataagagaaaaatattttgtctgaccaacttggattttgttttgtgtgggatagaaggagatgcatcaaattctttcctggaattttccctaggactctctaagtgtggggttaactattatttttatatctatatttttgtttgttaatgggatattaaaaatggacttgatgagaactgaaaatgtcatttcctgattgggcaggatttgactgatcaatggaaaacagttttgtcatggcttcaaatggattccctgtgaatccttccagtacttccaattccagatgcttcataaaagccatcagtataatgaattagacagaaatatgaatccctcatatggtattttgaccccagctggtaatatgactgtgatccgaggcaagaatttccagaagtactaaatgcaattggaatagcagcaatagatattagtttcagctatcatggtatcagattttcattctcctccagcctggtgctacatgaagaatacaagcagtcctgtgagatacttcccgagtctgaagcttttatgtccggatccccagaatctaaatccctacttgcacaacaaaaagagaacctggaaaatatgttgggaaatgagagtggggataacaaacctaacattcgttaggaatctgtccaacatggctcacaatgtggtgcactgacagtaaagtggcccagccccctgggccccagaggaagagttaaaagacacccagcagctgttcccttttctccggaggccagaagaggaaatgggtttatgctggagcaggagggatttagcctggtatatgaaaggatttctgcctcaaggtaatgctttctcacgaacagcacaatcacatcacctgcttctgttatttaaaaacacagaatctagtgtcttctgatggcaggttagagaccactgatccctggagttccagaggcccactggatggctctttttaatattccggaaagcctaatcatagagattaaacatttaaacactattattctgctcctcgaatagactactaagaatatctttctgaaaaccttttaatggaatgatattggctcagtattatctcatgttggtcatatgctcttattttaataaatgttttctgtgaatacaaatagagaattcattgtgacttaattttaatcatttgtttgctggtcaaaattctacaaaaactcgggcccaatgaaaaagaaataaaaaattaaaaagaagctcttggtgttaaaaggcaggaatctgcttttctatctactttttaaagaaggggacagcagaatgtattacactagacttggggttcagatacatctgggttagacgtctaacactttatatactgtctacaagcactttttctagcctcaaaaaccctttactttgctcattttaaaataacgataatactcaacttgcagataaattgtgactatcatatgagaaaatatcacatgtgatatgtgcacacacaagactagccttgaaggcctcttgttctgaggaatatgggaacacagaaataaattttccagaaaagaaatcaacaaatacttgaagtcatgcaattacaaaaggagaaatgtcaaatgatcttcaaaatgacgaagtcatacgaccattgcctcaaacccacatgcttgtctgttagtttgtcttcactatataaatggaagggactgttgcaaaaacataagcaataagaatgaagagctttcattagtgacagcgattttatttatttatctttttgctgtctctgccttcttggttattggtctttttactaacagagctttaacacagttggttatgtattcagctcatatattatttataggttctatgtgttgtgatttattcattgacttctcaaggcttaaccattctttaatccattgaaaaataaatgtgatgtacttcttcggagctgctgtccatattttttttatttctttcggcattttaccaacagctcactcttacaaaagagataacagggaacctaagttcctgcattagaccatatctttctttggattacaccaaatctttttattgccttcgagttggatgggctgtcctgcttctcttattcatgtgtaggtgatattttgctttgtccattctgcaggttatccaggtgttttacagacaaggctgaatgggagaagacgccccacctcctacaggaaagggctaatggcagctgcctggatatggcagcaattttggaggtggacaacaattcagtgtagacacgtttgtggctcttctatggaaaatgccagcctgctttcccaggagtatctcacttggagcttctctttctgctttacttgtagcaatttattaccgaagccatcagctgtatatttaatcttgttttgaggtttccaaataggaataattcaaaagtagacctggatggtttaggttagacagacacatggctatgatgaatatcagtccttggcaaggttgatttatgtactcttttcaagtaataaggaaacatctctaactattttatgttacaagaaagaaatttataatatgaaaggctgaatgtttctattttttaaagcaaatcagaaaataattgtgtggctgcatatggtgaagaggtaaaatttggataggataatcttttcaggcaaaattatttcaaagtttgaaaggattcttttaaaagaaagagtgtgtagaaatatataaaatacatcatgttcctgtattagacaagaattccagagaggctggaagtttcatcctcagaagtttatacttaaaagataaactcgagctgtgtgtttcccctaggggctggctcagccattagaagaccaaccatgtccacaaaggccaacactgtcagcctgtccaaagttcatcttcctagtggaacttgcctcaaaatgcaattagtaggacatttgtagaaatcttttcagtgtatggttacagagagtgtcaggttgactctgcttggaagaagaaggcaagaccttctgctattcatctctgaaaagtgcaaagatcattcgtttggatcgcaatgtattcaacatttaaatgcacttactcatacagtcctaactgcccttcccatggccattcatggagatgcttcccaagatgttacacagccagtggcataaactccatcctgtgttcctcactcatgatttggagagcctctgtcatagctttttactttctcttttttctcacttcagatgtggattaaagtctgcactcacagctttctccgatagtttaaggatatttgatccttcagtatttatccattattggctctgtttacccaagggaaaattaagtgcagggccttagaacagtaagcgctttaatacgcggatgcatatgctgatctctgacagatgttggtctttgggaacaacagaaaggggaggtacgtcattcacttgggaagctgcttgtgcaaattgactgatcctgcaggtgcccgggcagcgtggccatgagccacgagcaatggtgagaaaaatgtctggtgcaggggcaactactgaaatattacgatctttcacacacatacccagccagctggcaggggattccgagcagtgcctcctaggaaaaacagtggttctaaaaggttttcattttaattatattactgggctttaaggtttaattttgtgttttctatgaaaagagaagttttatttgtagttgttactaggcaatcttatttctaagtctactgagttatgatcattttctcaggttaaaatgcatattaggcaaggtggcttttgtgcttgtcaagtgtgtctgtgtgtgtgtgtgtgtgtgtgtgtgtgtgtgtggtctcctatatatttgaggtagaagaaagcccttcaggtagattttggtaaagattttttggttgtttttgagacagggttctgctctgttgcccaggctggagtgcagtgatgcaataacagctcagtgcagcctcgacctcccgggctcaagcaatcctcccacctcagcctccaaagtagctgagactacaggtatgcaccaccatgcaagactaatttttaatttttttgtagagtcaaagtctcactctgttgcccaggctggtctcaaactcctgggcttaagcgatcttcccatgctggactcccaaagtgttgggattacaggcatcagccaccccagcaaagactcttttgtttctggtttaacatttaaaactagaaaattttgctctttaaggagccccatagcaataaggtgacatctttgtgcaactgcatattttccattgccctggtcatttgtatgagggggggcaaatgcagggctgccccaagagtgccttgagggcagggctgtgtcttagtcacctgggcattccctgtgcctcctgtggtgcctgtcacatgatgggtgggtgcttatgtgctcagtgaagtcaagctcctgacagagacaggtgtcccaagctccctacgcaattgccattgtgcatgatattcctaaaagggaagaaaccctgcaagagcagtcatgactctgagactttcagaactttaggaaaactttattttcattgtgtgtataaaactcttgttttttcaaccaccagctgatattgtgacatcactggtctaaattaccaacaacattttgtctgatgtaggtactctctagtaggactctggatagatgccattaccctgagacctcaacatttatgaagagttgcagacctggaagccagtctgctggggttcaaatccagactctgtggcttcctgggtaattttgatggctcagcctctggctagatcagttggtgtgaggattaaatgaaccaatccatgtaagtgctcagatcggagctgtgcacacactacatacccaatacgcattaccgtatttgattactgatttctctgataacctcttttccagggaatgaggtgaaatctagagggaattcttgaatttttccttccctgcagtgactcagaatgtggtactatcggggctttctgagacctcagttcggctcctcccctcgccctgcaggctggttctgactctccacaccagctctgctccatgctgtggctgcctcgcccctgtcccttgtcttggttctaggtctggatggtcccggactctaacccacattcagctcagactcaccctggtgccaatcgcccacactatcctgtgtgttgtcactttaagtgactgaaggtctctttctaacattttaactcaagggatttgaatcaagtttcctgtttcttagggaagacagggattcacttttcaagaacatggatcaagtagccactcagtggaaagcactgctctcagtgcctgggacacagcggtgaacaaaacaaaatctctgtgttcatggagatcacatgctagtgagggagtcagataggaagcaaatggatatttgattgaatgccaagtttctggtgcagtcaaattttctcaagggttgcaaagtagtcatcgcaatttccacctagggaatatttacccctatggggcaaatctgtccatttctgcccatctgagcaagtaaaacacaggactgccacagttattgcggagctccatgaagcaagcaagagtcatcacattgatttattctcttccttccaggaaaatatttgcaatacctgccacgtccaaggttcagctgaggccaatgtaaagccagtattataggacacttctcagactgagagcccaatgtcgttggaaaccactgggccacaggaaaggcaggtaagaatcatggttatagattcaggtttggtgtcagacaactgctttaacttaggttcaccatcacttgccagtagaataaccatgagcaaattacttagcctctctgtcttagtcttctagggttgctgtaacagaataccacagaccgggtggcttcaacaacatacatttatttctttgaagcctgggaagtctgagatcagggtgccggtatggcctggttttggtgaggactatcttgctgctttgaagatggcagtcttatgtcctcacatgggacagaaagtgagctctagtctttctcttcttgtaagaacactaatctcattatggtgactccacccctatgatatcatctaagcctgattaccttccaaaggcccccaccttcaaataccatcacattggggtttaaggcttctacagatgaatttgagggtgggcgacacaaaaatacagcccataacactctctaaatctcaattttctcatctttataatggggatatgtaagtatttaggtcatagagtttcatgaagtttaaatgagcttatgcacccaagatttgacacagtacaaaataaactgtacctgatgtttaaagtcaagctcttttggccccagaaagtcaataaacccatttagagcattcaagaaggcagagctactgtttatcttatctgggctgccacaggtgtggtgggggtttcccaggaggcagcaatattttgttaaatagagtagcctcttggatacctggtgaaaccaaatctcttagacatcatctgtgaacatgatgagcaaagccagtccttagggagatggcacccttaggaagcaggcagggggttaagtcgggcagttcagggcaagtcttcagtgatggggaggagcaagtgtggaagggaaatcagattacacagaagctgggagacaggaaaaatgatactgtagttcgtttttctgaactggctgagcagacagatacctcataattcatgggggcccaggcctgtgttagcagatgaatcccgatgctgagtgcctggcttggaatcattggcaagaggtaggggtttaggggaggtgatttattattttatttttatttttattactttttgagacaagatcttgctttgtcacctgtgctacagtgctgtggtgcaattacaactcattgcagcctctacctccccagctcaagggccctcacacctcagcccccaagtagctgggactagagttgtgcaccaccacatttggctaatttcttttttttttcttttttttttttttttttggtagagacagggtcttcttgtattgcccaggctggggagggggcttaatacaggtataacaggatcataaatttattcacataattcagctgtgcaatgaaattctacatatttatttttttacatatttatttttctataaattctacaaattctatctatttatttttctcagctgatctaatcttcatgggccccacctgctggatcgtggggtgatcaaggacttccaattaaattccaagctcactctcttccactgtgataatttcttttgaactattctttcaaactctcagtttctgtcagataaatatttagctaagggagctgtgttagtttgtcttctaaatgtgagagagggcctgggtaaaaaaaaaaacttatatttcttctcacagacaatactgaaggaaagatttaattagggtgtctctacaaatgcagatttttcatgatttccttgcaagcttcccttctgcctcgctttttcctcctctggagctcacatcctcctcccttagcccaagggaatccagtgcttgcactctttgtaaaggagcatggtctggtgccagaatcctctgtacctagcagatactcctccagggaagatgtgcaaagagggcagcttaggcaggtgcaaattttagggtaaaactttagaccccaacgctcaaaaatgaggaagactttttccctgcgtacttcaagtgtcactactggctagtctcatagacataaaataagctttggttattaaacatgctttttgaaatatataaatagacgacactgtatgtcctaaaaactgttatcctagttgcttaaaatgcatatttatatacagtgatatggtttggatctgtgtccgcacctcaatctcatggtcaattgtaatccccaattgttggaggtagggcctggtgggaggtgattcgatcatggggggtgtttctcgtggtttaacaccatcccccttggtgctgtcctctcgatggtgagttctcgtgagatctggttgttgaaaagtgtgtggcacctccccccaggctctctcagtcctgctcctgccatggaagaagcctgctcccaccatgccttctgccacgagtaaaagttccctgaggcctccccagaagcagatgctgtcgtgcttcctgtatagctgcagaactgtgagcgaactaagcctcttttctttataaattacccaatctcaagtatttatttatagcaatgtgggaatgaatgaatacatacagtgaccaagttctgccttcctatattaagtttattatagctgcccagtagctacatatactaagctaaatgcggcttcaaatactgagtccttcttaatttttaggtgtaaataatttggcttctgtgaaagttttaaaatgcatatataacaaatatttcatacctaactatgaagacaataaaaatatcacccattatacagggtaaatagactgagatacacaggttaaatagcctaagatgttacattgtccaagtcaaaattaaactactacttaattttttaaaaaggactattatcctgagatagttaaacacggaaggaagctcgcttatttaagcaatattacccaagattagtggcagagcacatagaaaaagaagagatagggcccaggtttgagaaaattaaggaaaactgacggattacttagctgaatagttttaagaagtgtttttagttcagcagaagtggtctgacctcagcgcacttagggcattgtttacacgcttcagagggctaaggaggagatttaatcccgaacgtattccgctggagaaaccagataagtctacctgagccccagcagggtatatatactccgctaccatcaagcctccacctgaaaatgtctccatttaacatggcagtgctgtcaattaagagccaatttgacttaacaaattcaaagaacctactagtaagtttatactcacaagttccaatgtactatttgtaactcctccctggtctgttccatgcaagaaagcctctcaaagtccttcacttttcattctactgctttgcttctactactaatacatacaaaggccaaagaagctgcctctctagaattcctcttccattatagaatcttagaagttgtgactgtccatttgtgccagggatctatctgtatctgtggctaatccaaaaacctcagtcctatactttaatacaacattagagctgaacaataaggatgtcaagtattataatctaatttcagaactatgatgctacagaaatagttaattatagaaatacttagaacatactagaaataaataggacattcttgaaatacacatcaaaagtcatattactctttcttttagacttatagatggggtcacacaccattctacaaagaggggagtctctccgtgaaatgacttgaacttataaagcgcattctgctatgtggttgcctcaccaactcccttcctgcctggactattacagtaacctgtggattggtctccttgccttgagacgatgacatttctggcacctaaacccatcagcatcaagttgttcttttgaaaacataaatatgaccatgttacatgtttttaaacctttcaatggaatactttcacctacaggataatgtttagattttttaacatggcatgcatgacgcttcactctctggcttccacacattctccagaattacttcctgtcactctcctatgtctattcttgtctccaacaattcccaacctcttgtgctgtggtccatggctctccatgcctcatgcctgtgctgtcctggagcacttccttcaactgatacacaaaaaaagtcttgcttattcttccctgatctacctgggtttcaccttcacctgtatgcagagttaatgccttcccgctgtctgttcccatatcaggctgtgtactattgaaatattcatcactcccttcaggctgtggcttaatgtgcccatctccttatcagccttggcaatttaaggacagaggttttgttttgttttttgttttttaatctctctcatttttgtgtgttctcaggagcaggagagaagggatgttaatatgttgaattaatgttaatcattaaaaccatcacaaccccaaatttctttaatccctacttaatccaaattgattgaatttgtacaattttcatgaatgttgaataatcttgaggtgaaataatcttatttcacaaaataaaaatttgttgaaatatcattcaacaaagatattattctaaatattcaaaaccgaaagaaagcataggtcatagagctatttggtggtcagttcagaggaaactttgacaggatgatgccaacaatgggaaaaaaaaagccccaataaccatcctgtcttataacctacaaataatgttacatacaattttaaattcaaatatatttgttagcatgtttgaaatctatttttgtttgtttgttttcctgggctcctcagatagtgaattggacttaggaacagattttgaagaataaactagaatcagtcaagtggatggagggtaaatgtcctctagggggataactcaccagaaaaagaggctgaagagtaggcagcaagggaagagctggtggctcctcatctgtagcacagggtgttgtgaaagtaggagagagaaggctggcacggggtgggggcgggtgcagagcaggtcatgtagggtcatacaaacctcactaaattccaaagaccacaggaagtctcagaagcatttttccaggggagggatgctatcagatttgcaaaaaagtagacttgaaaatcattctcaaggtagcacaggtgctggaagaataatgaaaattactgaccttcaaaaagtccttattctgtgcctggtattattccgggcatattacatatgttactgcttttcattttcacagcaaactaagaggtgaatactagcatgtcttcttttactaagctacatgcacactaagtagcaacactgagatccaaatcaaggtaatcaggcaggagagtccgtgcaattacccttgctatagtgcctccccaaaggcaggaggaattggagtccggaggtggatagcttagttaaaaaacaaaagcaacagtagaaggaagaaataataacctagggtagtgatgaagcaaaaagagagatacaaatgtaagagatatttagaaagtaaaattaattaggtttgataaccccttaaaaatcaggtagagggtgatgttcaatgtctgcctcagacaggtggaggtgctatttgcaagaataaagaacagaagcagcatcaggtggagagggagcttttggcaatgtttgggattcaatatgtgaagctagtattataaaacagtgtagcaaagtgatatattaggagttataaatgcacagaggaggaagtgactcattctgattaaagaagactcagataagttatctgaactttgaaagatgtgtagattttccccagttgcaaaatgaaagaaagggtattacaggcatatggaataaaatgtgcaagttaaggcatcgtaggaaagcagggtaaatcccaaggtaccgtgagaatccgggccggctgcagagtgcatggcagagaatgggagctgatgctgaaggaaagcaggagtgaaactggggaaagtttccacatgcttaggagctgttcctctctgcccaggagcaaaatatactctcacaagtcccagggtcggtcagtgcttgtgtgtagttgtacctttggaaggttatgcccaaggtgacatgtgaaagctgctggccaggtttagggaatcacaaagaaattgaaggctgaagttcacaggctggccagccccagaggaaattctattttcacatgaggattctgctttgctctctagcctcagaatgtggcatggtggcagctgtcatagtatagcatcttgcatagtgttgtgctccttgactaggaagatataccccttgagagactggtggacagtggtgggcattatttccaatcccctctccaggtccctatgtctctcatatagaagtctgctactgatgacaaatctggtttattgagcaacttattatgccttacaagccaccttgtatattaagtgccctgctttcctccctttcctggcttgttctccagtcactcaagtctcaggaatgttttcttttcatttcttttattttttaacttcatctcaattttgggttttttttcaacttttattatagcttcagggggtacatgtgcatgtttaaaggaatattgtgtgatgctgaggtttggagtacaaatgaatccatctcccaggtagtgagcatagtacccagtaggtagtttttcagcccttgcccacttcttccctccctactcttgtattccccagcatctattctcatccttatgtccacgtgtactttatgcttagttcctaatcataactgaggacacgtggtatttggttttctattcttgtatcggttcacttaggatcatggcctctatctggaaccattttgctacaaaggatatgattttgttgtttttcgtggctgcagagtattccatgctggatacgtatcacatctttatccaatccagagttgatgggctcctgcattgattccttgcctttgctaatgtgaatgctgctgcaatgaacataggggcgcatgtgcgtttttggtaggacaacttattttcctttgcatttatgtccagtaatggaaacttttctttatgctttcaaattttatgccctgccatcattccagcatctatcacacttggtttaattatttgtttaagtctatgtatcctcccccggactgtgattttcttgcctccaccccaccctcactcccttatttctgtaatagttgtgcctagaacagtgccaggcacatagtcactcattacagtttcttgttgaaagtaattgaatagtatggaagaaaaagggaagctttttacttatttaccatggaaactgctctcaatgtgattagtaagcaaacttttcttcttccttcgttttcccccatagtcagaaactctcactgcaggcttcggaaatgcaatccttatggagcttgatgcttggctatcctcacagtagatcaagactgcactcctattcccatatttcaagagataatttttcttgattatgcatgaaatgcacttatctgtggaggaatcgatcagttctgactatttacacagttcacatctgcaggaggaaactctttcataaataagatgcagcgaagtccagaatctgtgaaatcattttggcccaaatgagtcttttgtgtcctttgttcatggagattgggtgaagcaaggtgcacctgtttcaatagtaaagcagccccactgaggaaaggactttttgagttgtgtcattagaagtcatcattgcatatgtgagagaagagaggaaggaaagggcaggatgcagtcacataacaggtaagaaggtaaaacaatgttctcttaaaatagtggagtgcatctatcccactttaatttggcctcaaatagcagttgtatgcattttgcttctaattccagtgttctcagtgaaaaaaaggaaactgaccatggatttattccagggcatttatgcctgacctgctacctgttatggacagaacatcttgtaggttctttatcctcctgtatggacataggggaagacaatattgactagttaatcttggcaggtaattattagaagatgcctgttttgtttgttttgaatatctaaattatcctagaaggagaaaaagtaggatccccaaaggggttggcatctgagttgaattttgaagcatgagaagaagctagcaggcaaagattgtgggggatgagtattcaaaacctagggcacccacgtgcacacgcagggaaaaagaaaccaaggtgttgtactcagaaaatgcagaaatactgagagtagctcaatcagactagagtgtaggttaagggagtgagaaagtaacctaggcaggtatgcagaagcccgatgaaaaaaagaccttataaaacaccccaaggactgtgccaattatttagaagtgaatgaggagtcagttgaagattttaagaaggaaagtcacatggttagggttttatgatagaaacacaactttggcaatggaacccaaaacacctaattgaggcaaatctgtaggtgggggagaaggccagcaatgtcaggcccagtccagtatgtacacctgagaaaaacttccacatgtgcatgtaagacacaaagatttgtttcagccttttttgctatagaagtactagaaacagtctaaacagtcactattaaaggattgcatatataaaatgcagcagtgccacagaatgaatgtattaccacaattaaatggcatgaatttgatctttatatatatcaatgtagattgacttaaaataaaaatgttaaatgaaaaaagcaagaaacgtgaagtttcaattatggaattatttaaattatctaaatttatatagatttagaaaatgcacacagacctaaataacgtgtgactacctgtgtgtgtaagtaaaaatttaaagtgaagtggaaggttatgcaccagtctcacataatgtttgtgtgaggagagggggcagagagggaaatagaactgaataaagtggtgaataaaagtggcttcagctttttctgaaatgtaatatttttgtaggtctttaagggaaatataggattatattgcttatgtaatttttctaaatatatacttagggcaaagagattaatagcaaatatgatacaatagtaacagctattctgagttttgcgtgtgtttgttcgattatactttgtattattttatactcgaaaaataatttatcttcttataagtaaaattgtgtgtatgtgtggtgtgcatgcatgtgtgtacagtggccagattcatgtattagctgagactgctaactgtgaaaccaggcgataagagagtttcggatgcattgtcaaccaggttaagataagaacaaaaaagagttgaatcagttcgtgacttagcaggtcaccactgaccttgacggggatgatttcaggagagtagtataggtggacatcaggttgcagtggattcagagaatgaatgaaatatgaagaagaggtgacaagtgtcatctatgtccagaagattggctgtaaagtggaagaaatagatggactagtacgtagaggaggatataggtttaacgaaggtgattgttatttttaagagtagggaaacctgatattgcttatctgaaacaggaaaaataaagaggagaggtcaaagatacagctgagagagggaataactgataaggttagggcagaagaaaacaggaaggaagagagtctactatgggaaggtggagcctctctgagcagtgaaagtcaagagaggcaaggagaaactcagaagtgcagaaaggaaggcatgatatgagtttgaggaatttcaaatgaacagcttcaattttttaaaaatgcaaattgtataattctgccttgactgaatattcttacttacatggaagaaatataagaatgtgtactttcttgtacataaataactacagctatttaacttcttgttattatatgaaattatcaaaagcagtagtaatattattcttcttgcaattatggcaattttggttttggcaagtataatgaatatcagaaagaaaagcaaattaccaagtaatgtagacagggatatgcttttaaataatagaatctgcgcttagaccatgaaagttgttaggtctatactacaccaatatatcatgttggaaattaaacatattatattctaccatgtgctaattacattaaatactccatagaactacactgatgtaaaattcttaactgatttctctttcctccttttccatttgtatcctactgaatttattctttatttgacctaattgattggattaacggatatttttggcactgttcagtgacaccttcatatataatgcaaaatacttggaaatactatcaattgacttcattcattcaagaataccaatggagctcccaacatcataatttcttaaaacttgattttcataggatcatggaattctaaaattggaagaaatatgtttctagtcatctagtatagcttccaatccataggatgaatcctcatggctaatgaaagcctggaagaacattagaaccaccatgaggaggtaaggaatgagcaacattttcttctttttctgggtgaggcaattatatatgacatactgtctattgatgaatatgctaagagcagcagtaagcatttatttctattcatttggccaatagtggccaggcatatatttattgaatcaacatatagttacataggaaatgacacactctgccaactaggagtttccagtcacatacaggagacaagacatcagatagctaataagacacacaaatcctcagtactcaaaggatagcacaacttgctttgtagtcatacagaaacaattatttgtttgtggacatacagcatccttggaaagctattagcttccatgtgaggaaagctacatgaatgctgattacaacatgttacagttgaatatcagcactgcaaagaaatgactgtgctttcattgttggactgcctaacagtttcaaagagttcccaatcaaaactttgtctgttggtattcttgaaaagggggagagtcagtcgtgaagcattccatattaaaaaaaaaaaaaaagtaaagaaaagggggagggtgggtagaacttatgagaggagcaaaatgctcagttagagatgttggctgggcatggtggctcactcctataatcgcagcactttggaaggccgaggtggctggatcacttgaggtcgggagttcgagaccagcctggccaatatggtgaaaccccgtctctactaaaaatagaaaaattagccagcatggtggtgcaagcctgtaatcccagctactcaggaggctgagaagggagaatgggttgaatccaggaggcaaaggttgcagtgagtcaagatcacaccactgcactccagcctgggtgacagagcaagattccatctcaaaaaaaaaaaaaaaaaaaaatgtttaccatgagcccaacattttttaaaataattgtaccccaaaactgggatgcaaaaaggaagaataaattagtcatatcttcagtaaagaaattgcattgtgaggccgggtgcagtggctcacgcctgtaatcccagcactttaggaggccgaggcaggcggatcaccagaggtcgggagttcgagaacagcctgacccacatggagaaaccctttctctactaaaaatgcaaaattagccggcgtggtggtgcatgcctgtaatcccagttactctggagcctgaggcaggagaatcacttgaacctgggaggcggaggttgcggtgagccaagatcgcgccattgcactccagcctgggcaacaaaagtaagactccatttcaaaaaaaaaaaaaaagaagtttcactgtgacattggaacccacgagtctttcttataaagaactaaagaactaaatttttaatacagtatttaattgcagccaagacccttactaagctgtgctttcatacatgttacactgttttaagcagatgatctgttgattcagaagagtgagagttgaagtcaaatgactcctttttttctgaaagcgttttcatactatattatagagaaggctgaggcaaatttcatggttagattcatatttgaaatttttttcgattgcttcgacatattttatacaaagtattttatattccataactaaagttataatttttgtaaacaacaacaaaaaaggtaattagttaagaaggtgggggtacgtcttacatttccaataaatcaaggagcaaagtttgcaaagccgagctattatgcacaaaagcaccatctagtgacgagaatgagtaactgcatgcacacaagccataacaatataaaagcaaggacccatgaagcggcaggtataggaactcgctcccatgttctcactcattatccaatatgaatgaaaactaatttgtcagtaattagtttcaagccctactctctacacttagtgagccctttgggctttatgattttatgcagtttcccccttttcagtattggctgtattttgaaatgacctaataatcatagtaagttgtaaatgactgataattgacttaacacattctcctcccaggacatatttcaattttgaaagacatgactcaactaatcagtagagggagggattttgtgttagtagggccatagctatttttttaattaaaaaaagaagtctctcaacttctaaataattgaccaactattcattgcatttcccctgattaactggcacggtcattagaaaacctttgaaacatcactgagacattaaaattctgactattagtgcttttctattgcttaggaagacaatacatacaaagcaaagcactataaagttagattaacatattttggcattgtgtgttattatatgttatcttgtatgcaatatcacaatttttgttgtttccctgtgtcaaaaatatagcttcctggctaggctcagtggctcatgcctgtaatcccagcactttgggtggccaggcaggagaatcgcttgagcccaggaatttgagacctgcctgggcaacataatgagaccccatcgctatgaaagaaattaaaaagcttatgaaaaatctaagagatggctgatatgccttttaggaagaagaaacagattcctgagagttcattacaacaagtgtattacaatttttttttcgggcttggattttgaacctactgcacaatctgtcctctcagcacactcctaaatgctccatggctcagaaaaatgtcttctaattatcagagggtatccccactacttgttcagaaaatagtgtccacaaactaaatgtccaacaatagcagaatatttaaataaaatatcttcatgctggactaactaacttatagacaacagaagccaattgtctacatattcaaggacagaaaaagtctttgaatataatttgatgagtttttaaaaaccccataattgtatttttagtatgatttcaagtttgaaaaaaataatttttatatccctaggaaaaactactggaataatacacttgaaatattaagagtggtcatctatggatggtaggattaggggatacattttaatttcctatttaacctcacctaccatgtcagctaccatgttttccagattgcgttaacacccccagttcttcactcatgtttgcattcatgcacttcccctctaattttgtagttcttccaataaaaaggtagagtatttcgcccacaccttacagttgggttcatccctgtgggtggctttggttattggaaagttagcgggaatttcatgagccaaggcctggaaagtgcttttattggtcttgccctcttgcacctctgccatctgcatgagaagactggcctgaactggaggatgatctccagtggaggatgatattcacaaggagcagagccaagtcccaagctgagcccagccaatccccatctacctgcacatctttgctgctgggattgttgaagctgattgctatgcagcattattgtggcaatagctatctaatttactgttattacaaagaagtgatatacatgattcaaagtagcatacagtgtaattgtggagtaggaggtcagacccaaggatggaacagttgtctcctcgctgcaaaacaagtgcaatgctttccattccctgggcttcccgcaaattctcttttatagatatattcttagatattgagttcaaacacacattgaaatctgtcgtatggatgggcagagattgctggaaccacaggccaactcaactcatatatgtgcttttcccgtaatttttcctcacttttcctggtattagttgtaaaagaggaaatgtatcaataatacatttacattccctgtcaaaatcactgtattatttttcaatttttcatgctccaattgctatcttcaccctctttctctccttgtctctccttccttcctgactctatggtttcctgtattacaatagggaaacaacacaaaggggcagcaatgacagagggttcttcttaagaacccctccttgaaacaattcagtttagtacagcagtatttcactccctgaaatatttttccctgagtaggtgaatcttatgtgccatcctctggtttatggacactccagtgcatttacagaagatacttgactacgttgatcacccatgctgaatgcaacaaattcactcaccattccatttgcctcaagccaacgttagtggagttttagtgaaggctgaggactcagaaccaagtcagtctatccagagtgggtttgagggactactaacacaatggttctaagaccttgggtattagaactagtcttggatcatcagtgatgctggagaaccaacattgtacccaccccaccccttggctctgggctagctgacatttggacacttgacagagagagggtactgtaagccactcatggctgcatggggaagctgtgaaaaaggacagaaaaccaggacaactttgtcacagtctccaaggaggctgacattatctggtctcctctttcctcctcctgcccaacctcaaaggagtaggcacaaggaagaaggcatcccatcttgcctccaccctaggcccctctggcctgtgctgatttgtgaattaagaaagcctaaaatgaatacgagattcaagtttagaaacaaaacagcactaaagtatactttaagagctaatacaaaatagttttgataaattgaagtgacttaaagagatggactcagacacatattattaaggaaaactgaaagccagctagagaggagcatttgacagaagcggtgagagtacgtattggaaaactaaaagtgtttcatgttcagactcccagccagttgagactgcttgctgaaccaccttgctcaactgactcagctatggatttgtgttggggaaaaagaggaagaaggaaacagatcatgaatgtttctttttcttggcctgctcctggcaagatgtttgtcccctgcacttccctactatctctttctgacccctttctgcatgccccagtggggactctgctggttttgtgacccagtttctttcatacaagagacaatttccggacaggcatgcttcagtcttgtagggtgagggatcggctggccacatcgatttgagaaaacatagttgatgctccacacactctgtgttccttataagacccccttctttatcatccttcctcctcttgtactgatgtgtgtggggagagaggaggctggtgaaggggtagtgcttgtcccaattatcctgaaatggtgctttggaaatctttaaacctagaatggaggtgccactctccttttgtcctcatcagcgggctgtaggagttaattccaggaaaacaagaagcacttcctcagcccctcacactggcttgttagaaatgtgtacggaggccacccaggcaggggcattgcattccagggctcatccccactgcctctcatttgcccaatcagccacttggcttggcccagcagcttggatttgcttttgttcccactgccacagccactaatggtaccggagtggttcctctgtgcaaggggccttcacagccacaccctgccgaggaatgcgaggccacccttgacttacctgtcagaaaaggatcagacaggaagagattttccagaccctacaccgggttccaaggctttacaacaataatatccagatgttctcttgagaataacatggcaaactatttcttccacattaagataagattgattccctagtgtgtgggcaaaaggtctcccactctggcggctttttgatccctgactctactaacttaggcctccctttgtggggtccatctttgcagctttctctatgccctgccccgctttactccagtgacttcctttcctgcttggttcccacttcacgtatcactcagagagcccttggaactgctagattgagccatatgagagagccatgtttgtaggtcaaaaagccaaatattgggacatttgtatgctttaacttaaaaaaacaacaaagaaacaaacaaaaaaacactgtatgcacctaccaagcccaaggagagtgcaatgagggatttatgttgtgtgaagtcaaccactatacattttattagaactgtgtcagaagatccaatattttaataagcctaatggaaatcttttttattccttaaactttccttttttaatatgaataagtatctgatggatcatctttatttggcacactgggtcattttcttgctaaagtcaagctcagtaatatctgcttaacggaattaagtatgattaattctgtcaaatatcacattagatctcactgcatgtcaagttgaagcatcaataaaaatatattaatatgctttcttaaataaaggctaaacccaaggaaaccaagccaggaagcattcatggacttgtccatttcagaaaacttacaactattattcaagaaagcaactttcatttacttcaggtattctcaatcctaagaagttcacgttctaactgagaaagaatagagtttcgtgcttcagggagaaaaaggttatttggagtagggtggttttctttaaatattacctaacctcagattccaagtgagctcctaagctgcttgcttctctccaattctaacttgaagcatttagaaaggccctttccttttagttaaagtcacacatcctaaaatcctgcagctgttcacctaagattgccagcgagataacagctataaaactcaaaccataagatgcaaatttttgcacattttctcagttccagcctctccaaaatgttctgcatccttccctgctttgcaggattttatgggaaaaggagcaaatttgcaaaccagctgagctcaccatgtgtctcggcttcttcagagcctatgatttgcccaggagtgacttagttgataaatgctgtgtttgtttcaaaggatggtagacacactaaggaccatctttgaagtgagtggatatagaccacccttttgctttttccagtgaacaaaagcactgcctttctatttctaacagtttgcactaatacagtgtgaaaaactaaatatagaatacttttgttaaaatcagattagactaattctatatgaagtgctttaatgaaaaatgtttaatggttgaaatactataactctggagttaaagtgcaggtgcaagaatgatattctacactccctagagagcaaactagtacatactgtgaaatatcaattaaagtttatagttgcctgggttagctaaatgtctttttcatgggaaatttccattcttatgaaataatcatttggggttaaaatatgtgctgaattatgtgggcattctgagttattaagaaatggatttatttttacaagcaagctgtaagcattctttgctgtttttatgaggtcatcgacatgacttttaagtggggctccaggccaactctgattctcacatcagttcattaattcacacagctgtctctaaaaactacaagaataatatatactgcagacagagggccagcaagggggtgggtgagatttaaggctgtatttcaatcgagagatcctgctgacatcataaactatgagaagacagcttaagctgtttggggagcagcagcagcccccctgatggaaatatggctagtttaattgattcttttcagtttcagaatatacagagtggggacacccagtcgtttttattccgaacacagtcagaacattaaaggcaggcactgcaggaatgcattagcagggaaacccaagcagcgacttaaggtgtggggatggatttgattgtgttaatgatatatgggcagccgcactgacatatgaagggcatggcagagtttatcgcacagggattttgttttataggcaattgtgaactcactgcctctatgaagagttttaccaaatgagttgtgacaaggatgatatgattgtagcatgagtgaggggttgagagaaccaagtcctctctctacttcctgatttgtagcaaacattgaatgtgggggactgagtataccctgtgatgggacttctgacagcttttcccttttgatcagaaaggggaattgctaatattagcactaaaatctcattctaacacgagcccacattctagagaatgtgataccaaactgaatttggagacaacttatatacaacttatgagaatgtcctgatttctgataattcattcagcattaatatgatatttttaaaaaggatgtctgcagtttcatatcctttaaattccaaatttgtttcggttgacattagaaggtgaactaaatctctctgagagtaatttcagttttacaaataaatgcagccaagtttttatgtctttggaggggggaaacttttataaaatgtgacgttttaagtgtgctcttcagtaactctccattaaaacactgacacctgtgtgcatgtggatactggagatttggttgcccttatctcatttgtgtacacaaaagtctctttgtacatgtgaattgaagctttgcatgaaaaacagatgtgtcctcaaagagtctaagactgctaatgtataagaaagactgacaaagcatgcaaattaatgaaaagattggggttgagtctcctctgggcaacccctacatatacgtttctttagtccttctataaatattatcttgtggccaggtgctgtgggcttttctcttggaattttgaaaatatgtaaaagctagtgacacccaggctgcaattgccaagtattccctgagaggctttagaactggcagagctggctctgcacccaccactccagggccctgtcacactctctgcagcctcttctaccacttggtggatgatggtgagactgggccagtcaggagcacttcctcgtcaagacaaggttgagaactcttcatggatgcatttgaaaccttattaagaaacaggtccaccttgatagtaatgttttgataaatccaagtttagttaaatagactgtaatttgttttaaaagatgttttgtgttacatttgtttagataaaggaaatgggaggaccaggtatggtggctgatgcctgtaatcccagctttgggaggctgaggcaggaagatcacttgaggcacacagttcaagaccaggctgggcaacatagcaagacccagtctctactatatatatgtgtgcgtctgtgtgtgtgtgtataaattcacatatagtatgtacatatatatatagtatatgtgtgtgtatatagtatgtgtgtatatatagtgtgtatatatatacatagtgtgtatatatacatatatagtatgtatatgtatatataatgtgtttatatatagtgtgagtgtatatatgtgtatgtgtgtgtatatatatatagtgtgtgtgtgtatatatatgtgtgtgtgtatatatatatatagctaggcatggtggcaggagtctgtagttctagatacttgggaggctgaagtgggaggatcacttgagcccagaagtttgaagttaccatgagttatgattgtgcaactgcactgcagcctgggcaattgagtgagaccctgtccatcttaaaaaaaaaaaaagaaagaaaaagaaatgtgagtatgtgagtatagcttattaaggggtgttcatttgtcaaaggagaatgcttctcaattttcttgctagaggaagcagttggatgggataaatgacagctctggaggaagaagtgatcatcattaggcaaaattggacagttttaattaagtaggagtaaatataaatttggccagggagcaggaactaaagaaaatctagcactagtaagaactgtaaatgtttgttcagcaaccaatattcagagctggttgaaatcagaagctgatcaggttagttttttgagggataaaacttctttagttaatagttgtttggtgttatgggactaaacatttgtgtcccgccctccccccacccccaattcatatgttggagctctaaccctcagtgtgataatatttgaaagtgggatctttgggaggaaattagggttagatgatgtcatgaggtggagctagtatcctcataagaaaaggaagagacaccagggcactcacactctctctctgccatgtgagaacactgtaagaaggtggctgtctgcaagccagaaaggggctgtcaccaggaactgaatcaactggcatcttgatcttggacttcacatccttcagaactgtgagaaatcaatgttgttaagcaacctaatctgcagtattttgttacagcagcttgaactaagacagcaggtttactacagattttatgaatttgttttgttggaggagtctttttttatagctattaaactttctttttgtcaaaagatttatttcttttatttatggattataggtacccacactttggaattgtgtaattgtagccaaatcatctaaggtaaagatttccaaattgctattcaggtcattgatcatgctgtatcattcgcaccttaccagcaactggtaacagcaaaactggtgcaccaaggtgacgatgaaggcatcaaaagcattccaataaaatccgcatattttaggacttgtagatcttttatatgcttttccaatgaacgaatctagcatttttcttgatgtatgaaaggtgagggcattagaaatggctccttttttgtgggaatgtgtgatattggttcaataatgattgaagccctatttttgcccctcattctcaaataaaaaactactctgggcatgataccccaaacattgcatgaattcattttgggtatatttattattttatctatttcaagtatagaaaatcattgcaagtctgatttcaggtacttttcttgtaaacaatgtctaaagctcttgggagactaatagtattccctaatggctgcccattccctctgatattagattgcattttttgactgacatccctctgatttgttcttagaaagatagcagactacttaagataatcccattatatttttggaaggatttttcaataccaattttctttatcctcagcagcacctgaaaattatttctcagctgttgaccatgggctctgccgatctggtgtctgggtttgtggtcctgtgatgaaccagatggttggaccaatatccagatatcaagaccaagtggccttcagccttttctcccctggccaggcctcctgattcccttagttatccaatgttttcatgtgggcccctcgtggcttcccttcactgtgtctgaggccctgaggagtggtgttaatagtggctgaaagcattgactctggtttcagacagatcttggttctacttctgaaatattgtatgatattgggaatgactgtttcttcatctataaaatgggcatatgacttcatgaaatagttgtgagggacacagtgagaccacatatatttagtacccaagagcacctacacatagtaggggctcaggaaatgtcagttcccttctgatctccacacctggatccatttattttgtttctttctcagtttcaacccaaagctgacctcttgtggctatcccattgtaccaatacaacaaggttttatgcatacatagctgataactgataaaagataactgataaaagagagtttccgggaagctatgtaactttcccaagatgatagagtaaatggcaaatcaaactcacagtggtctgatagcaaagtccatatccttaaccagtataccttaaagcctcccaggagctgctgctctacccacagataatggggaacattccccaaaggcatttggacatatagatggtaaaaagagcagggtggacactgcttggccaaaaataagcacatgatctttatcaaaagttttacagtaccacctctcaccaacagtggggaagtatatccatttatccacacactggccaacacttgatatcactgaccttttttagttttgactttctgatggttgaaataaatatcactttattggccatttgtactgatttttcagtaataggttagatttgactttgactgatttctaatgtccatccattcaaagacattttccaaaggaagggcctattttctaaaggaaataagaaaacagctttctgataaagtgatatttacatggcttaaaaatggaatttaatatgccattattattcagaagatagcagcacttttttgactcatgaagttaaaatgacagaaagtatatttaatatgcttatggtatggttttctgaataagaaaaaaatagagatattaaaaatccctagcgctgacagtggattccagcagacccacaccaaatcttagaactctgtgagtgcttggcacagtacttatgacagccatttatctctcctaggaaattgtgctttctttaagctgtaccattttcttaataccttacactcttggcatcaggaactgagcatctagaaaaaagcactatatgtttggaatttgtttttcaacaatttgtatttacagagctttgggataacaagtgacgcacactggtttgacatctcgtgaaaacacgtgtatacgtttttatacactgcgtaaataggcatatgtccacactgatttctattagtaaaatgtcatgttgggaccaatgtaacatttatagaaacacttcacaccctaaagcacaaagtaagtaacaaatgtcaaataatttttgtacacggagacaggctatattctcttggtagcgtgcaattacattagtgatgattaaccaaagataacctccaaatgcttttggaccattaaaaatcattcctacataattcatcaatgaaaaaaaataatgaaaatcttacttttgagtatagaagaaatttcagacaaaatatttgcatgttgaataaacctgaataaaccagtgtactagaaaaatatatcaggaccaattgttgtttatcataggaatgcaaggatgagttaacattacaaagtctattcaagtaaatttatgcactaacaatttgttggaatattgcattacaagttaagagaaaaagttgtggacacttaagttaaaacttttggggaaattggctaaaacctgggaaaaataaaattaagtcacaaattcacatcatacacaaaaacaaactccaaatagcataaaggacttaactggaaaagtaaactttaaaatttctaaaaatatacataattaaatctttttataatatcaggataatgaatgatttcttgagcacaacataaaatgaacaaaacataaaagaatagattaataaaatttacatcataatttttaaaactttgatgaaaaaaatcccaccataaacaaacaagcataagtcatagactgaaagaggttatagaatataataggcaagaaataattcatataaggaatgtattttagaagtcttacatctcgatcagaaaaaaagaaaggatctgaattcaatgaccaataaacatattaaaatatgttcccttttattagtaacaaggaacagcaagttaaaataacaatgtgatacaatttcacaatcacaagtttagcagatgttctgataacactagatgttgatgaggggttgggaaatggaaactcatatactgttacagtgggaatataaattgctacagctacttcagagggtaatttaggaaaatccactgaaattgaaaaagtacatagctgggaggcctagacagtactattatttttgtaaccaaccttttcggactatttgattctcaaaacatatatgcaacttaaagaaaatgaaaaaatttaaatgaaatatacaacttaaataaaaatttaaatattaattacaaataaacagaataacaaggaactatgcctggaagtgtaggctaaagccaaactttcaaagcctctgaatatcaaactaaactctagttgtaattgatgcgtgtggtaatggttagctgctgaatggtattgggcaatgaagttacaaagcaaagctattccttggaactgtcttgccaaaatgtggagggggcaatgaccagcaacaaaacactgccttagtaagtgaatagactattaagaagttgaactcaggcatagtgctaggaattgagaagagaagacagattggagaaacagcccatctgctgagtcattctctctgcctgctgccctgtgctaccattcagctcttaccagtccaaacttctgccccactaaggactgtctggctctcacttgtccctactggcccctcgctcccagaggctccaggccattttggacaaagttagcccttaagaccattgcctgactcacaacctcatcctcctggcctttccgaggtttgcctctatgcccagtaagtgtcttctcactcttttggaagataactttgctgaaacttctcccatgcacaccaaagaggcaaagaagttggcccctctgttttctttttatctttggtagtatgagcattctgtgtgatctaccttcaggattccagtgcttctacatgttaaagcatattctcaatgactaaagctaccacttttgcaagaaagagttaatgtcctgtgaactaacaaaaaaacttctagatatacagatgctccttgacttacaaaggagttatgtcctgataaacccatgataacttgaaaatatcataaactgaaaatacccttaatacacctatctacagtacaccatagcctaacctagccttcataaacgtgctcagaacacttacattagcttacagttgggcaaactcatggggcaacacagtgcactgtacagtatcagctattgaccctcatgatagtggggcttactgggagctgcagctgtggctgtccagcattgagagagtatgataccacatatcgctagctcaggaaaatatcaaaatttaaaattcaaagtatggtctctactgatggtgctttcataccaccataaagtaaaaaaaaaaaatccaaagtcaagccattgtaaatcagggaccatctgtttgtcctagagaaatttttacacatatggacacagacatgtgtgagaatgttcaatacaatatttttatttagcaaaatactaagagcaactttaatgtcaatcaaaataggacatattcataaaaggggatacatagcagctaaatggattagtaagacactacatttatagtgactaatctctaaacaataaaagctgaggggaaaaagttacaattgtggtaagagttttggaaggatatgtaataaatatataagtagtatctctgggaactgagagaagagagtagtgtatttgatttctcaaagaagccttagtatttgatttctcaaagaagcatagaaaatgactattaaaagatgaagcctgtgtcataggctgggacatagtggctactaatgtattccattctccctattaaaatgccattttgaggccaggcatagtggttcacgcctgtaatcccagcactttgggaggctgaggtgggaggatcacttgagcccaggagttcaagaccagcttgggcaacatggcaagaccctgtgtctatttaaaataaatttaaaatgccattttgagatacagctgtgcaccaccattttccacaacaaaagtgtgggctggagacccaagccacaatccaaaaaaatcactgtgattgtacccatagctagtctcaggcaatctggagaaaattgcatcctgtcttgggaccaaagaattgggaaaagaaaataattgccattgctttcttgccaatcacttttccctaaaatgaaataaacatttttggtcttgaaaaaaaaaaagaacatgaagccaataatgtaaaatgctaatatttgctaatgagaggtggtagcaaaacagagtccattatattattttctatacttttctgtatgattgaaacaattttaattaagaaaataagcaaaagcatatgcttcaaggtccagcagacgttagttttaaagacatctccacttaagagctacctattgagagtaatagcagctccctcctaggtttagggttaagtgagaaaataggtgtaaagttctagcacagggtctggcatattaggctcaattaatgctagtttttctttccttctacctcactaagcatgtaagaaaagctctataaatattcgaagaatttaaaagcttatctatacacacacaaacacacataaattattatttattattgtaacaacaaaactttatcttccattgatatctgacagcaaatagcacctgatgtgagttcccaattgttaataaaataaactagataattagtttttataatataaaaagtgagtcttcaaaatacttgattattttttatgtcactcacaacactgagttaagataatgaatgttttctttattagtacattaatgtatcttcaaggttaaccttaaaatcttaaaaagaacatattttatgtgaaagcatattatcagaaattgttccataaatctagtaaacaccattagagactaaaaactgataccaaaatacaacagaagctcttttttctagaagacttcaaattaaaattattcaaattctttccaaatcaattcttctggaattacttattatgtcaacttttatgtatttaaacctaaattctgtgggtaaaattccaacacttctgatgggtctatgaaaagtttccattttatttgcaatcgacactggacattcaatccttcttcctttttaatgacaagtaagtaaagcctaaagcagtgaaatgtaacttttatttaatcatattgactttctaaaaatcaaagctgagttttcaaacttccttattgtgttaggttgggattttgctagtgttatattttctcttttaaaagtatttatgcatgggaaaaaacaatacataactggaaattgggcacaatttcaaatccatttccaaatatccaaatgttctgattttaacttagcaggttataatcaaatattgatcctatcattgataataaagaaccgccttaacaacaatagttttattaatgaatacacaaaatacaatatgaggaagtggtttaagtactataatttcttttacaaaatagatttctttatctaattttaattaaaaatgactaacttttataacagttaagttgatttttaaatggtgatatatgtaaatatttttgtttgcttatttttacaactggaaattcttttctaaattgcatatggttcttaaatagggttgtttgtagcacagcttgcataaataaatacagttaaattagttcactgaggtcagttttggttcatttatggttccgtgtaatcctgttacttttcttcccacttttaaatgagatgcttacaacaaaaatgttgttaagatataacaagaagagaaaagccaaatgaaagtcagtttatatgaaatttgcctcttgcctggtaccatttgtgaccatgaggccgatgatgctgaccacaggctgtggaaagggctttgttttcacaggtaaccaaatgcaaacaaaagaattgagtgtatgtaacttgccctagatggaaatggaatttcacattgaaagaagtaatttattgcatgtttgacccattagatcttataaagaaaaagtattccagaaaaaaatgtagtacctcctacaatgaactttttagatggatattacgtgctatttatattttgaacaaattgttgttttcctcaggtccttgtcagataaaaaaaaagtcctctatcaaactaaaaatgaaattacatattttaaagtttaattgaagatgaactttctctgggtcaaagattgaaacttatttatgtaaatgcaaattatataactgactatagaaaattgtgtgtaactattatcaaaattttcttccaaattaactcagcctgtggagtttgacttgaattcttcttttccataatgttggtgtggcttcctgagtagacacagttgtcgtttatttgaaaggaggctttcaataatgtcaggagagactttcctgcttccagtctctttcccattcaattgccacagcatctggtatttgccattctagatctttctattactttaaacaattacttagtccaacagggacatcacctacctagctgctctagccagaaatgtgtgtatcctctgtcccactctctcacttaccagcccccacatccaactggtcacaaattccttccaaattctttcctccttctgcacccctccagctatttcctggtgcctctcaggatcacacttcagctcctgcaaggctgctcttacacactgtgctgtctccctcatccctgcaaccactgctattacatctctttagcttcagctgcactaagttttcatctttcccagaacatttctggccctttcacaactttatgaccttctcttcctggatataattttcttctgtttaggctagaaaaagtcttcttaccaacgaatattcatctcaaatgctaccacgtctctgaggccttccctgattgtctcttctgtgctctgactgcacatctcttacagcaggaccatattttggtagaattgttttttaaccaacaccaagaccactataccaagctgctggtgagcaggggtggcctcttactcatctgggtcactgtcaggacggcatcatgcatcactgtgcctggcataccataggtgcacaatacatgcttggtgaataaatggctgaaccaaactccaacattcggtagtaaaacatgaaccctccacctccaaatatgtttactaggtgcggttctctgggactggaggtaccaactagcaaggtaacactgggggtgtttgggaacctgatggagcacaagagaggacagatgggaccaaagaggccatcagacatgcttcacctacctcacagcagggccaaggcaaacctggccaatatgatcaatacctggatgcttaaaatagtaaccaaaaaaaaaaaaaaaaaaagaagaaagaagggagagaggagctgtttctagacatttggatcacttaaataactactctgtggggctgggcgcggtggctcatgcctgtaatcccagtactttgggaggccgagacaggtgggtggatcacaaggtcaggagatcgagaccatcctggctaacacggtgaaaccccatctccactaaaaatacaaaaaaaaaattagccaggcgtggtggtgggcgcctgtagtcccagctacttgggaggctgaggcaggagaatggcatgaacccaggaggcggagcttgcagtgagctgagatcgtgccactgcactctggcctaggcgactgagcgagactctgtctcaaaaaaaataaataaataaataaataaataaataaaaataactactctgtggataaatacatttaaaaaaattgtgaaatttgcgtagcctaaaagtaactgttttaaagagaaaaatgcagtggcatttagtgcattcacaatcttgtgcaagcaggattgatggtactattttggagctagataaatacatatttttaattcttccctcctactcctaattcacagtatctcttcagtagttgaatacactccatagccactctcacttttaatcgtgaagcaaatgtaaagcctgggtgtaagaagtttgttcaaatgcccaagaggtctaaattctacctaactgtgatataattgcatgaggctgagacaggggttggaaatgcctgttggatgaatgacactagagccagactgaaagactgaacctcacatttctgctttgaagtttgggacaacaataaatgcatttattgtgggccttctatgtttgatttcagatgacagatgacacacaaggataattcctttatttcagggagaagcaaggggcacaaaccacatgagtagtgtagatttggaacagattaacctctacctggccttctagggaaatgtaggggggtgggagtggaatgtgagtataaatcagcaattagctatacatcaaggtattctctttataatggtgtatatgttggtagatttgaaatttgtaaatgcgtagctatgattctacctctctgtactttctaattggtaaaacacccaaaatagcagaatgtagagaccaatattaactagggcaaatataagcatacaatattacagcccagccatctgtctaaatatctgaaatatgataagtgcaaagagcatctttgtcacaggatattgagatcacgtggctatagatcagtattagttgatgaattagatgtaatgaatgcaaaatactaagaggatgtatatcaaatctgaaaatcacaactgacaacctgtgctaatatatttattattttgacatttaattttatttttgattacatttcttcccctcaaaaatttatttttttagaattaattgcatatattcattctgagacatggaaatcctatcactaaggtaacattgtccacaaatgcttggtctggaataatattaaatgacaagagagaataggattccaccaccccatagacaacactccattgcaatggaactaataggctgtgaggagatttatcctgatggtctgtggtttccttccaataacattgttgcttgctcattttaagacatgccttaatagatgctatgaaaccgcatcacattttctagctcctgtaaaaattcagtgcttctgagtattaactttgttttcttagtgacatcagtttgttttaacatttctatcaggaattctattgtgagaggagacataaattaggctttacttagtttattctgagtttctcttgggcagagttttggtgaaataatctttgaaaatttaaaaaacccttcacacgatggtagcataatcaagtttctccttcactacctcatttgacacccttctggggaaaaagaaattgctattttaggcaggaaacaaacacaagggaaagaagggatgttttgggtgacattggggacagataagaactccatgtgctttggtgaaatgtagctgctgggtgcaccaattctcaaccttccagcttcctctacttttccaccctttttgactctcccacctgcaaggtcagctgctctaaggagcaatttataaagttgcagctcatattgtgcttgcagttccagaactgacatgaaattaaatcagtcttgagtgctgcaggatacaaaagctaccttcctagtttactgagcccttcaagactcctaataaatcttggaaaggtagcattccaccagtgactgcccagtttctcccctcacaaaaagaccttgaaatggaaacaacgaaattttcttcgaagccatatttcatgccatggagagaaagacatacgtggaagccacattcttaagctcccttttccaactctggggcaggcacttcatgagacagtgttaaatgagctcttaccttactcctccatgttccaaaattgctagggccacacagtgtgaaaacatccatgaaatgcttactgtactcacaaagatttttaattttttctcaagagcagaaggtaagcctttaaaaattctctaagtctacaaatacacccctgctacaaatatgtagcccctcaattttcagggacacatgaagcttattggtggaggttcaacacaatatgtctgcgaaagaatctgaagcagatgctgtcaaatagtaacactcaattatacccaatagtgactcgtattttccaatattttagaatgtaatcttaaatcattagtcaaatccacctaaaatctcacagtacaggggaagttactgagtctttatttggtgccatgtgccatgcaaaatgttttatagacattagtgcttaattttccccaaacttctcgagtgaagtattattataacccctgtaatggttagggtatcatatccatggtacccagttttggtcaaacaccaatctggacattgttatgaaggtatgttttagatatgattaacatttaaattaatagactttgagtaaagcatgttaccctccataatgtgggtaagcctcatccaataaattgaaggccttaagagaaaaagactgaggtcccctcctgaggaagaaggaattctttctccagcatgtgtttgcaacatcagctcttccctgagtctccaggctgcaggcccgccttgcagatttcagacttgctacacctcaaaattgcatgttccaatttttcttaaaataaagctttctctttccctcctctatatgtatgtgtgtgtgtgtgtacgcgtatacatatatacatatatcctcttggttctgtttctctgaagaaccctgactaacacaccgctattttaaaagtgatgaaacagaggctctgagagatacatgtttgccaaaggccaacagctggtgagcgattgggcagagcataggctgccctttctttctgggccatcttccttctagtcaagctggagtccgtgtttctcccagcctgtggccaacagccacgtgaaaggcatgtgaagagttggttgtgtttaatcctgtcatcggttttattggaaagcttttcacgcagcccacgtgagggaaaacgatttgctcaggatgaatgtggccaccaatgtgttatttcccttaatctaaacagagcctcaggcacacttcattgatcatgcctccaggctgaaaggcccccttaatgctggccagcaaatattatgtttctgaggcagccctgtgctgtcaaccacatttcctgatctactctgattagatatataaacagcttcagtaaaacagagcctgagctttgctgttaaaaatataagataaggcttccataaagattcatcaacagcagaggtgctgtctaagttagggctgagccctctgagctgaatttctttttttctttttctttttttcttttctttttttttttttcggtgttgtaagagggtcagtgagcaaacaaccacgatttataatcatgtttgaatagtggctggtgcactcactgactaagggagaccttggggaaaagaaagagttaaaagaattgagcagttcatgaagtggtttgcattaatggcccagcacaggactgacattactcaaggttacatagtcattttatatctgctaagaagtgtcacactgtcccagctaagagcaaggaagagatgtgctgacacctgcaaggtgcaaatgcttatgaagaaaggccaagaactccctgaaaagcaaattaaatggtcagttagggaaaggaagtaattagaaccaaatgttctacatctttaaaccatgcatgtttcagatacattgtgtaccataaacatgtgccagccaggacaagttaagattttattatagatatatgtgtttaattagaatatgtttcaaaatcctcttctaacatttgtcccgaagatgaagtctattatctaaagggtttttccagctcaagtgtctttgaatgagaatacatgccttttctagataatttttgacatttgttctgaaaagaaaaaattcagtgagagtaagaagaggattatccaatatcgcttggtgggaaaatataagaagttaacatactgaagtttcattattaatatacatcaatattttaatgtgttttaatacttacatgtaatatctaaagggattttgctcacttaaagagctgcttactccccactttaaagatcatttacaattgtcctaaattaatcaatactatttttattcaataataaaaataattgctaatatttatcaagtatttacttaattgacttaatactaggtaccaaatactgctttaacccttttacaaaaattggctgagaaaattccttcagcagccaaggagcttgctgctttttctcccctcttcatttcagtctataaaattatactcagtaatttaaacctttattgaattaaaatagtattctcccgggtccatgcctggtttgggttaactaacgtcaaatacaaatatgccttttatttcccatttataatagtttttgtttcttggagttattgtaatcagtggttcttatgtctgtctgtgcatttaaatcatgtgagaagtcttccaaaaatacaagttcctggccacacgtgtgactcttgattttctaaggatggaatgcagggttctacatgcccaacaaggaatgaatctgattttcttgtcatagaagaggtgactgcattgtcttagttcatttgtgctgctatagcaaaccacctgaaactgagtaatttagaaaagagaaatttattttttacagttctggagggtggaaagtccaagatctctgtgctagcattggtgtctggtgagggctgttctctgcttccaagatggtgcctgtttctgtgttctcacatggtggaaggcagaaaagcaagaacgtgctcccttcaaccttttataagggtgctaatcccattcataagcctggagtcctcatgactttactacctcccataggccacaacttttaacactgttgcattggtcattaagtttcaacatgaattttggagaggacattatcatttaaaccatagtacggtgtcatgaaggttaagtagcctaaagttatactgatagtaagcagacatgctaaatgcaattataggaggagctgcaggggttttaaaagttatgctttagttaatcttattttgtttgtgcttcaatgacaagcaacatattttctttgtgcgagcactcaaatactaagaactaaatttatattaggctacattgaaataatgcatttggagaacttgggccacctcactgaggcttccagaaaaatgcatacgtgtgaatggtctttcattttttcctttacattaaatatctgtaggcttggtttacacatgcaaatggtttcagttattagatgtataggagagaatatctgagattgatgtgggtctatgagtaggtctgtacagaagtcagggaccgtcaatgttttacgtggctggactagacataacgctgagtctaggttcagaagcccagggtgccagtgctgtcctggtcacttcctatttgctcatccctgagcaaatcccaggacctctttgggatcgcttctatcttttgcctcccaaaggattctctaacaaggaggttgacggcttcccccaaggaagactcagagcacaggttcagggcaagtgtttgatgatcacatttctgaataaagacaaattcttcattttggacaaacaaaaatgaatctctgaaaaaacacatgcatgggaaaccttagggaagattcttactttcaattcagttattgacccacttgacacataattgcacccagtgatacatggtggaaaggaaagagtgcacttagcttttcctcacagaacaaacattttctgttattttataagctcccacaacatagtttcccacattttctaaggaaaggaatgttacatgataaacattatactcagagcctttactgtaacagtaaattatttccttcattttgtcttaatttccaagtacaccatgttgagatcaacagatctagctatttactgtttaaagctctgaagtattaatccgtaaattcaggaagcattgccatctatagtgtgcagtttgatgtacagcagattgctgggtcttaacagtgcctgccttggctgcaatttcccatttgctcaacataaaggagaggcttgctaccacagactggaatcagacataagccatctgctcccacgagagccaaagttataagaaccatctctgtttgtggaacaagttgtgtttaccccagcttctatggagtttagctctgcccaactccttcatcatgtttatgtttcattgctccattacatatttctccccaaatccatcaggctgggcatgatggtgcatacctgtaaccccagcactttggtagtctgaggtgggaggatggcttgagcccaggagttcgagaccagcctgagcaacagagtgagaccccatttctacaaataataaaaaagttagctgggcatggtggtgcacacctgtggtccccgctgtttgtgaggctgaggcaggaggataacttgatcccaggaggtcaaggctgcagtgagccctgattgtaccattgcactccagcctgtgtgacagagcaacaccctgtctcaaaaaaaaaaggccccaaaatcaatcctatgatttcagcagcattcattgtgatttctttccactataatgtaatacctttccttatatatcacattgtgcaactactactatatgacattgccagatccattttcttctaccattcactgtctattgattacccagtgacatctgaactaagtgtgaagttcataatgaatagatttttaaaataaagaatgaggacaattctctgagccccccaaagtttatgaaatacaatttatttcactgaacctcttaagtttagttaaattgaaagaaatgtcacctccccagctgaagtgtgagcaacttgactaatgaggctgagccttgcagctcctttgtaacctcaccataattagcacgcttaggggcccccgcattgctgactggctagctagaagtgactttgcgccctactttttactacaatgtctttcagaatgcaactgtgattggtggttagaccctttgctttcgaaacaagtgcccaagaaatgctttttttttttttttttttgcttctgactaatcttctgggttcatacatgatgctgactaatcttgctactttcagatgtgatgctgagtggtcttccggaaatgccaagtaaggaggtactttaagaattagcaaaggtcccttagtgagaattgacctggcatgaagggacatcacacattgtgagagtatcttataatcttgtaactacttctatgaataagtgcatgcacagtgacaagcaataaataggccagttcttctgaaaattctagagaacagttaagtgatgacccttcacagtttctgtttctcttctggttcagttttaactcttgtacagtgtacaggctttgattgagtaccgccactttaaattatacttctgaagttatggagggcagattaggaagcaagcggcctctcccccagtgatgggcaagggtatacacttctataggccacgtttagaccatacaggagggaagcagccagtccctatcttgtaaagagccctcccaaaggactttcagctagggatgaagcagcctaagctcctaaagcctagatatacaatattggatataaaaggtaagcgtggggagttgcaagggaccagcagaggagacatagcccataccaggggactgtaatctccaaatgccttcacaaaactgtctcccaagagagccagctttaaatatctctcatacccaagcggtatccatgttagattagagctgtcctgctcaagtaagacttctcctttcccctcctggaggagccaggggcagcacactgagtgtggaaggagggattggtggggaaagagaaaaggggcaaattataacttatcccctctatactgcaggcttctaagctggaggcaaaccaggctaggaaaggggaaacttcaaagttggtgagaatctttagttctcatactgaactttttattctctaaaaaaggctagaatagaaaaagtccacagagtggttttcagggttagaattaagaaaaaataaaattgcttttagtttatcatttgccacgtaatcaaatactataataggcatattatcaaatttgacatctcctaactaaatgaaaatgacaatacactccatattaaaattgccgttatgaaatagaacagaggttcaacagaaaaataaaatgccctaaagaagaaaaatgttggcttctgtccagagatggcacaaagattttcccagctccatcctaccttgagttcctctccaataaattgttggttttcctggatattatattctcacttatatttatttgaatgtctttattctgacactcacaataatgaggcacattactgcccactctcctctctaggtatatttagagaatagacataaagctactgcatcgctgcatctgagccttttaaaggacacactaataggtgggattgtaactataagaaggcaataaaggtgtggagaggtctagatagaatatttcattaaataatatttggggaaattagcatgtatatagagaagagagaaagaataaaataataggaaacactaatacaattttaatttctaaagctaaagaaaaattttcactaacctatgaggccagctagagcaggatttataggaagcaggtgtaaggttaaaatttggagcatctttctttcttttttttttttttttaagacagaatctcactctgtcgcccaggctgctgggatgcaatggtgtggcgtgatctcggctcactgcaactaatttggagcatctttctaagactttgcatgtaaatgtgactggatggccatctgtcaggaaaagactagaagaattgaattggaaaagcgaaaaaaataaaagtggatgaagacgtcgttattttagtcaattcatttactgatagcacttgtggtcccaaatgggccctgggtctggtctggggcagccttggggtcattgtttattatgatcctcactaccagttcttcctttctgccactgagagaggctaggcctgccatgtcctcagaccagctcctacctgtaaccgcctcggtctgcacaagaaggcagagcaaggccactgcatacagattttgaatacattctgtctgtccaataagccactcaaagatttttgcctttctctgggctatcagatactgaacaagaagaaaatggacttgtttttatttatcttctccttttggaagtctagtctctcaatcatgaacttcagcaccttgtgctccttctgctcttatgcaaactctctttcagataactaatgatatcaataggataatttactgtggccatgcactcatgagacgaggacttcaaggcctctgcctgggccattaatcagggaagttcatcctctatgcccatgtccttctcctgataatagacactcagtaaatatttgttgaatgaataaaccagtcagccaagaaagctaattttttttaatttttatttctggcaaaatacaattttttgttgcacttataatagtaataggatgaagatgtgttttaaaataatgtctattagttaattaggaggattaatcctatgctcactggaagataactatcacagtgatgaattgtgtttgccctcaagttctgtagaaataaaatcagttgaagcatcacgtgtagaaaaggtgaaagcagaattgcaacagaactggcagagtccgaacaaaggagagctccaataatatccagttactacagaaaacacagtgcctggcacatgaatactaagtgttcggtaagtgtcaggatgatgatgatgctgattgttattatcattcccattataacaaggtaatttaagtggtattcagataagatattaaatgtcaaatcacacattgatgaatttgcttccttttaattttttttttttttttttttgagacagagtctagctctgtcacccaggctggagtgcagtggcacaatctcaggtcactgcaacctacgcctcccaggttcaagcgattctcctgcctcagcctcaagagtagctggaattacaagtacccgctaccacgcccggctaatttttgcatttttagtagagatggggtttggccatgttggtcaggctggtcttgaactcctgacctcagatgatctgcccaccttggcctcccaaagtgctggggttacaggtgtgagccaccgagcctagccgtgtttcctttcaaatttgattttaattattctgatgacctcaagagcaatgttgccaggtggcgacagtatatttatacacctattaatgttgaatctttgagcagacctggagctcagagctggaaattaatagcattgttttgttttcactgtatttatttttagaatcactttacatttattacaaacaacattgatctttatcagtgttagggttttaagtattctttaaaataacatttgtgtggataaagcaagtcaatttaaagaaaatgtgaagttagtgatagggtaggaagtatacagatcaggcagaatcctgacggagaagggttatgtcaagagtttgggaaagtgcattggggagtttgcttgaacgatcagatcactgcagtctaaatgtttctgctcgagagagacactgtgccacatgtgggcgcccaccaccactacctggtcacctgattggcataggtagcctaggaagtaatctctccagcatcggataaccagtggtgaggaggaagcagctccagtctaggtggctgtactacactagtgccaaacgtcgttgctcccttcccttcccctccaacccagctggtagttgggtatactcactgcatccagtttggcagcaacgtgccacgggttacagacccttatctccaatggtagtctgtaaagggttaacaacaggggctctgggggaagaccaggtttgtgacatttgctgatttcagtgatctaagtataatcaccttacctgattttaagtacggttgtttgtttgcaacaaccggctggcaaaattcctgaaaatttcacagttgcctctggggagcctgtgccagtgggctccagtacactaccccattttcactctaagtacggtatttgattgtgaaaccatcccgacatccccccccgcacctctccccaccgactccccaagtctatcttttcttctaaactttaagctccataagggaagaaaccatgctgccttattcgccatggtaattccagtgccttcctgacacccagcatataccccataaatactgattggctattacgcgcataacgtgagatcaaaaggagttcctacaaagacccttaaatcctccagacttcttaagcttaggaaagatttttgcttggttttcggttttctttttcttattttgagcagcagaccagcgtgactccacagtttcaaagagcaagcgtctatatttgtgtgacccggggccgagctggggaaggggaagcagagcagcgctgacgcagtcaggtccctggtgcaggtgccagctccccacagcgcgccgaactccccagtatgagcgaacctcaagtcactgccctcgcgcttgtcgagcgaactctcaaggcttgcaggtcgtctccaggagtcagagaggtccggactccggggattcctgctccgcggagaactggggagcccccgttcctgtgccactctcaggtggggtgactttgggctctgggaaggagagctgtgtccgtgtcacgagggggccccggcaggtggcgagcagcaccgaagcgcgggccaggacgctcgtttctcggcgccctctcctgggtcagtggcgcatccacctccccagccaccagtgaccagcgggggcgtgcgcagcttcagaggtgcagtttggaactgccctccccctttcagtgtaggactggcgacactcctttcttcctgcaggtagcaatctccagggacctccctcaaccctgtggagggcagttttttcagtggctcaaagaaaacacgtctttcgtgtccctggtcagactgctctgcctgtaactgcggtgtgcagagagcctgcgcgagaccgttgtcctatctcactgggcttcaaagctaccgaaagcagtcatgagagaggaaatgacccgaggcaggatggtcccccagctccatatcccagcctggagagacctatttcttccattctgcaccttgggcctggcagcttaagaaataatgacacatggcctgcaggccaaaataccttggttctattcccaaccctgtcacttacgggctgtgtgacctcaggcaagttgctaaatctctctgaacctcagttacttcatctggaaaggaatggagttggacctcgtgattaataaagttccttttcagctctgatctcccaggattctaaatctctgctacctgaagatataaaaacataccacattcttttcccctagcaatacagttttagtggataaggctaactatacagttaatgagacttaatatacagttttagtgaataagacatacatgtagaaagcaaatgcaacatgcttgtttcatttatggcaaacaactaataaaatatatatttgaaagtttcaacaaaggactcatatccagattctacaaagaactcaaacaaattggcaataataataataatcccatcgaaaagtggacaaatgacataaatagacatttctcaacagaagatatataaattgccagcaaacatatgaaaaaatgctgaacatcactcatcgccagggaaatgcaagttaaaaccacagtgagataccaccttactctctcaaggataatcattattaaaaagtcaaaaaacagtaagtgttggcatggatgttgtgaaaggagaatgcttttacactgctgttgggaatgtagattagtacaacctttatggaaaacagtatggagattccttaaagaactaagagtagaactgcccattcaatccaacaatcccactactgggtatctacccaaaggaaaataaatcattatatggtaaagacacatgcacccgtatgcttattgcagcccaattcacaattgcaaagatatgaaactaaactaagtgcccatcgaccaatgagtggataaagaaaatgtggtatatatacaccacggaatactactcagccataaaaaaaacggaataatgtcttctgcagcaacttgagtggagctggaggccattgttctaagtgaagtaactcaggaatgaaaaaccaaatattgtgtgttctcacttataagtggaagttaagctatgagtatgcaaagacgtgcagagtggtataatgaactttagagactcggaagggggaggataagaaggggtagtggaataaaatctacatattgggtacaatgtacactagtcgggtgaagcgtgtgctaaaatctcagaattcactactataattattcatggaaccaaaaaccacttgtacctcaaaagctattaaaatttaaaaaaagttttttaaagaaaaaatgtttcagtattaagagcccttcatgtgactaggaattgaggataccaacaacaaaataagtagataaaataacaaataaaaggattaactgctgtctctgtgttcaaagagcctacaaatagatatacagacacatgaaagatcacaacacaaagaagtaacagcatgaaaactaggtaaattgagtataataacttttgtattttgtttggattatagctaaaacagtgaaaagaggcaagggtagacttggtgatattttttatctatcaagactcagggcagcccaagtacatccataatgccattattaatgacactgaaggcctatttccaaattattatcattcagtgccatctagtgttaaactgatggatggattttttcatattattttgtttttgtaaattccttgtccagctctatgtagtcagattaaagtcaggcaaacaaactctgcctcttacacatctagtcttatgatgtgatgtctgtattctgaaaactcatgtgtttcctgcccagccaggcacaacctgtggttcaggctctcaactcatactttgctcatctttcctggactgccatcactggtgccagcactctgtccatggtcttttccttcagacagcagaatttcataggactagatgcatcagtttctgagcagaaagttccacttcagactggattttgatgcaactcctagaatctggagtaaatctttttgtaatgttatctattagttcagctatcattggcatgctggccctttctataccagcgcaagggctgattgttacatttttggaaattgtgcaagtttccatgtatctttctttctttttcttttaagagttaattctgaggttatcagggcagggagaaagctactaactagccccttttgattaaatgtggtggtagccatggaccagcagctactgaattgagcagagggtcagaggtgaaatggagagagagctctgggaatgaatgtgtgtgcagtagactttggaagccattagctcacagtcaggtaaagtggccctctttaataaaacacccacacacacttcaaacttccaaagttcactctacaggaggttctactaggaggaaagaagggggtaatggaccatgcagtatcaaatctgcaattagagtataataattaccactatccctatgatgctggccttgatgggctctgtttcatcatttaaatatttttaactaagcatgagcaaaatcccttgactcgataactatcacacagctgaaaaggaataacagattcaaaaagaagctataggaaattagtgaggaaagagagaaataaacatacagagtgccataaaaccgaatatttggcttattttaaaaacgtgcttgctctctatgaagtttcaaatgtgatcccattccccatggatttccagaaagaaaaataagaccttacctaaaatatgtcattaactagtttctactctacttctttaagactgctctttctatttaacagttcacttcttgcaagccattgtggacagttgtgcctttcagagaccagattgggccaagtcctctctgtcttttagctaaagcccactctcccaggaaatgcttctgctctaagactcaaacattccctgttaggtgaggtcactgacatcagaaatggcctccccctttagagctggccctctatacacaggtagtgtaattttgtattttttcttattctctgtggtagagattgttggttgactgccaacatctattggcccatttctctaaataacagaatgtttatctgggcacacacctgcatggaattagaatgatatttcccagtgtctcttaaagaaaaatgtggccactttattaaattcaggtaatggcatataagtaaatgatgatgtgtagattgcaggagccttctttaagagacagctggtgtacctctttttcctgtcccttcctttaatccacagcctggaacatggatgcttgcattttgaatcctgaggacaaggactacttgcctggatagtagggtgataggattatgtggaacagagttgccgtattagcctattagtctagtaggactcacttttagactttgtttatagagataaataaactttttgtttgtattattttttaaagcatagttattttgagttttgcttttggagacagatcttttattgcattcccctccttcccccaaaattcttaggttgaagcattaacccaaggtacttcagaatgtgactttacttggaaatagggtcattgcagatgtaattattaacagttaagatgaggtcattaaagtggtctctaatccaatatgactgctcttcttataaaaaggggaaattggggtacaaaggcagacacacgcacagggacacacacacacacacacaaacacacacacacagaatgctgtgtagatgaaggcatggatccaggtgattcctctataaacaaagaaacggcaaagatcgccagcaaatcacaagaagctaggaacgaggtttggagcagattctctctcacagctctgagaaggaatcaagcctgctgacatcttggcaagcctctagaactctgagacaataaatgtctgttatttattttctagccttagcaaaccaatatacaatcttagccaattaaaggctgactagaataaccttagcttaatctagggcaattttcacaccattcagacagcagaaactacatacacatatccatgtacccatctgaacttctgtcataatttctcagtctatcaattttagcagtgtggccaaatgtcagtttctctggaatgccaaaataagggaattttgttgtggctgtcctatgaaaatgaagctctgtcacagagaagtgtgtgagccaaatccaaatactgagtttattttactgtccaaatagaatattttcaccccagtgaagcaattgtaagcatctcatccaaagcatattcactatccttgagtattcttggttgcttattgaatgaataagtgaatgaggtggatttggctgacactaacctttgggattacctcacagcttgccagtggcaagcttagtaagtactgggccatagtgtttgaggataggtctctagagtcatatgtctctaagttcaaatgctagcctcctgtattagtctgttttcatgctgttgatgaagccatacccaagactgggtaatttacaaaataaagggttttaattggacttacagttccacttcactggggaagcctcacaatcatggtggaaggcaagaaggagcaagtcacatcttacgtggatggcagcagacagaaagtatgagagccaagcaaaatggatttccccttatgaaaccatcagatcttgtgagacttattcactaccatgagaacagtatgtggaaaactgcccccatgattcaactatctcccactgggtcccttccacccacaacatgtggggattcaagatgagatgtgggtggggacacagccaaaccatatcacctcctttcctagttgcttggtttggaagagttatgtaatctttttgagcttcaatttcctcatctataaaatagggaagatgctagttactctcttatagggtagttatgatttattttatgtgaaatgtttagaatggtccatgccatgatgtactgcagttggtttgtactggctcacaatgaccaatagtacaccttttttctgattctgccaatcttcccatcctcacatccagtgacatcatattggtagtttgaaattaattggccatggtgagaatatttacactacagatatttgcaaatactatacaacaggggctagcttgccagcacaccgttggttagatgacatccgtaagttctgtataaatcttaacattattattactcagtaggtactcctgctcccttatggttttgagaaggccttcttctagttaaataaatcattttgaattaaaataacactgatgggactcttagcaatgttttacctcttgggaatcactgcctacatttgtggtctataaatctgaatccttaattcactcggattgatttttggctccgtgaaagcaggagcttttctcactgctgtagcccccacacatggcacaggcctgggacagagtaagcactcataagtatttgttaagtgaaaaaataaatgaatgaaagtatcccaaacacttgcattttcaaaaggttttgacatccacttccttttcttctcaaagctacgctttgagatggataggtcctattttacctctattgcatcgatgaagaaactgcaatgcaaagaagtgtctaattagtcatttgcttcctttcatcaaatatgtccattacaccagtgtttctcaaaatgtgttccatagatcataaatcctgaaggatgttaatagttattatgtgccaggggacccgtggatatataagtttggaaaatagtgaagtaaaaaaaaaaaaaattggtttacttactacaagttttctcagagccttattaagccaatgtgcattgtgaacacaggaggtagtggagatagttaaagtatgcagcattttctatttttgactatagtttgcttgattgattttttttttttttttttagacagaatcttgctctgttgcccaggctggagtgcagtggtctgatctcagctcactgcaagctccgcctcccgggttgacgccattctcctgcctcggcctcctgagtagctgggactacagttgcctgctaccacgcccggctaattttttgtatttttagtagagatgaggtttcaccgtgttagccaggatggtctcgatctcctgatcttgtgatccgcccgcctcagcctcccaaagtgctgggattacaggcgtgagccactgcgccggccacttgattgattttaaatgaagcatccagcagtgttagtgtgaaacttcattaggtagtacttttcagaccttaacttgcatatgaattgccaagggaacttactaaaatgcaaattctgatttaggagggaagagtgcctagggcagggacctgagatcctacatttcatcttcttttttcttcttttatttgaaacaaggtctcactctgtcatccaggctgaggttcagtggcatgatcacagctcactggatcctcaaactccgtggatcagatgatcatcccacctcaacctcccaggtagctgggactacaggtgcatgccaccacacctagctaattttttaatttttttgtggagacggggtcttgctttgttgcccagtctgatcttgaactcctcaactcaaggcaatccacctgcttcggcctcccaaagctctgggattacaggcgtgaaccaccatgactggccagagatcttgtatgtctaacaggctctcagagggtgcccatgctgctggcccacaggccacaccttgaatagcaaggcactagaacatacaagagtcaagaagaaatggcatcttattgaaagaccaaatgagaacactaaaacaccctattgaccctcaggaccagctgttaaagaagcatgttgttcagaggggtgaggaaataagggacaaacccccatatgatgagcaagtaatgaaggaacatagagctaaactaaatagctggagtagggcaggtcttttcagctgaagtctaggtggtgaattaattagtgaagggacacagagatggctaaagggacccttgattgctttgtggaccaaaatagcttcatttttgtcattaaaacctaggttcaaggagaagagggcaaggcccactattggttcagacttagttattgttttccttctctatccacaaactcaagttccatgagttactaattttttaaaaaactttttaattattcaaaatggaatatgaatgttagaaattggaagggaaaaatggggactgacataaaaagaggttaacctgggtcaggtgaggaagtaacgctatacaatgtattcagctatttaaaggcttcagaaatgctcgtatcttttacagactgatcttcctgacttcatctggtccctgctttgacctggaaacttagcttgggtacctgtgtttctccagcagtggctgttctctgctggtgccttgtcctagcagactcttctctcctagttccttggcaacagtgttctaataacctttgcgggtcacacagttcctaagtgtggagctgggattaggctaatggaggtgttataagactctccaacaatatattcatcaatgattcacttctactaattataactcgacatattttggtaacttattgaaagcaaaaaggttaataactcatgacttccttgtaggtcaaatctttgtccgtgtaaagcaataattttgcctaattttatattttttcccttgcattctttgggttaagttcattttgtcactcctgctctttatatttgtatatttatttgttcatctttctataatactagtttagattattctctagcgattacatttttttaacccagaaaggaagtattgtgttttttactgaagtttagattggttgtcagaactcatagattttattttacttgtgtagtcttgttcatgtttttgcatttttgtaggtcttgatgttttcttttacttaattttttaagcttttcttatattgcctgttttgtttctttttatcttttttcccatgtactaatacatacttattttgtttaaattatattcttgatttctgaacaattaaaaaaagaaattatccaccctatattttttagttacaagtatgttatgaagcagtatctttaatttgaatagaattgagtccttgctaagaaaaatgaatgagataaggtatttcatcttctgttcaccactcgtacctgtgaaagccaaacagcctgactttttatagctgtcagtgatcaatactgaagatataatctgtcattacaaagcagctggcttgggctttgaaatgtaaacagtgataatttatgaacgggttagtcattttcccataaacatctgcccatgtaccctgtgttgtaatacattcatgctattgcgttccttgtctgttgtaacattcgttgattagtaaatatttatagatgtctcttgtaacaaagtttggctttgggcatgatcagttaaaaataaattttaaaatatcataaaacaactatgtagtgcccaagaagaccttagaaaatattcttttcttcatgtttctgccctgtgttgtattggtcttgtcttatctggtagaattgtcatacatgtcaaatggggagcctcattatgatgaaaaatgaaacaaagggtgctttttttccattaccctataccctgaaatagccaaaatatacacatatggcaccagaagaacagggagtttgcctttttctagcttgttttaaaagtgcagtgcagacaagctaaatccagctgggaattctgtgggtcacacgcattaggcggtgcagaattgaaacctctgtctagagcagactctcagaagatttacatgcaaggttaagctagcatatttttgtttgtgttgccttaaatcttctcctttgaaggttatgatagctgctcagtgactaagtggttatttttttaaatcagtgatacattcgttgtttagaaggtatctaatacttcttgtcttaataaaaatgttaataacagatgaaactctgtatattagcatatctcaagtgtataatcctagtttgctatttacccatctgatttgtgtaacattatactgtcatttaaaatatacttttaaagccagattttacatttcaagttatctttagtaataactctcagtacactcacttgtaaatagttgctataaactattcacttgtaaatagttgcttttcagactgtaaaaatatatttactcatccctgtaagcttaaattttgcagctaattactattttctgatactttatgtatatatacatatattttttcttgaaaattatttccaaaaataattatttaaatgcaaatcataacaataaatgaaaacatttaaaacacgtacttatttttgtaattgccattctaaataatttaatcaaaatacccccattctgatttctttcccattcatcttttccaagaagttaagaacctgaattttaaaaaacactgtacccaagcagcaaaactgtgccaaacttgaaaggccgaccccaccttttggctctattgaccctaatacttttccaattaaagaaaaacttaacaaaaaatagaatgcaatgactactttaagccacttggcactttggggctttattctgttttcaaactggcatatgataattgaattttcttggggaaaactcaaagcagcaatccagctttttcgagatactccacttgatgaatctccactcccaaagaacatcagtgaagccctcgtggtattatctttgttaacaaagagtcaccacattttgatgattctcattctaagtgctaagacttaaaatggcaatataaaacatagctcaaaatgttttagtagaacttagctttatctcttgttgacttttctttacagttaaaaaatatagaaaccactttaaaagcatgcaaaaaaaagcatgtcccataagcaatttacttcatattgtgaaattaacatgttccatatttcaaaggtttgacaaagctctgtgcgttgtcattgactaattgatggaaactttcaaaatctctgatcctctggctggttatttactgacagtgtcctttatgggcttgtgtcttctgcatttcaaggactcatgtggcagcatagaaacaaaggatgttaaaaggtacagtcagatcctgcacactgggtgttaagtttacagtaatttggatgagtgaagggccatttcattatcttatcaactgagaaggaatggcagagctgaccactagactgggatgctatagaggttttaggggcacaacttggttttatacttgggaatgagacaggagttcagcaggacttgtttcacaagatacgaatcacaaagaccttgctggtaaaacaggatgcaataaagaagccagccaaaatctgccaaaaccaagatggcaacaaaagtgacttctggtcatcctcactgctcattatatgctaattataatacattagcatactaaaggaagagcccactggtgtcacaacagtttacaaatgccatggtaacatctggaagttaacctatatggtctttcagtgggaggagccctcagttctgggaatcccctgctcctttctcaggaaactcatgaataatccaccccttatttatcatatgatcaagaaataaccataaaaatagccaatcagcagcccttagggctgcactgcctatagagtaaccactcttttattcctttactttttaataaacttgctttcactttactctattggcttgctcttgaattttttcctgcagaaagccaaaaacccacgtggcctcctggggtgagtcccactttcagcatttgccctgcgacaagtaaaaagactatttgatttaataaatcctccatcttatttaaatttgggtgattttagcatatttataattgggaaagttttcaaagtgatacaggatggtgataaatgcacacatgtttacaattcagtattacagctctccaagagttttctggtttcttttaccacactcagaatttgaaaggcaaccatctgggtcatgaagatgcttgctgatcaactgctggggtagaagagactgctgcagtagaagagactttaagtcccttgctgaagactgcagtctggcttactggttttagttatttgcactacctaacctgtatctcaaggactgtggacaccatacaacatcacagaaaacttgatgcttggaggtttatcggattatgaaagatgttgtgtctgcctgtggtatcctgaaagtacagatacctgcagtcttgaacctcaacttctggattatttcgattatgaattctttagacagttttttttctttttcttttttatttttgagacagggacttgctctgttgtccaggctggagtgcagtggtgcaataacggctcactgaagccttgaccccgctgagttcaagtgatcctcctatttcagcctgttgagtagctgggactacaggtgcctgccaccatgacaggctatttttaaaatttttgtagatatggggtctcactgtattgcccagactggtctcgaaccccaggactcaagcaatcctcccaccgtggtctcccaaagtgttgggatcatagacatgagccacttcccctggccttagacagttttggttccttcagaattaatgatctgcatctgcaaggcatatggatctccactgatttacagggggtttgccattactgagttgacttgtagacagaaaaacaaactgcctttgttgagccatttgacttttcctcatatttttcccttttgtgaaagaccttaactgaggatccctgctttgcctctggaatatgcctgcagtaatgtttgttgagaaatctgagtttgggagtaactgttcctgtggggctgtagaagctggttgtcattctaatagattcctgagccttgatattgcttcaaattagattgttgcaagtttagaaggtgcaggtgaagttttcctttcaggttttgctggtactgacacaagcacagacatgctgcccatgagtgataatctccgtcttcttcatcctcttctccatgaatttttaaaacaacctaaattaccactgataactgtctcttctgagagttttctccctcaatacttatttttttcagacttggttctggagagcggattatgtcttatttaagctattaagtatttctgattcacataaaagtatagtgttcctcccttttctgtggggggatacgttccaagacccctagtggatgcctgaaagcatgaatagcaccgaaccctatatatgtatgtgtgtgtgtgtgtgtgtatatatatatactatgttttctcacatacatacatacatacatacatacttataataaagtttagtttacaaatccggcacaaaaagaaataataataacaactaataataaaatagggcaattatataacaatatactaaatttatgtgactgtagtcccttactgtcaaaatatcttattgtactgtactcacctattttctgatcgtggtagaccgctgataactgaaactttagaaagagaaactagggataacggaggactaccataccacttcatacacctgttttgtgcatctatttattggcagcctgtattatctgaagcgattgaaatggaaactttttaaataagtgccaccatctgcctttggacttgcgatattaaatctcaatagaaagaggagcagaagcataggttaatgtcgctgtaggttttcctgagatgagagatcctcctgcacacaagggaggtctcaatgaggtcttctggttccagctcaatatcaattacacccctagagggcgctgtttccctcagcggtttccttgatgtttgcagctcaggatcgtgcctccttttgcctcctagctggacacctttcgtagggtgtctggagctggaaatggcaaggggtagcccacatcttcctgtcttctgtcgtctcctatcacttcactaaaactaacaagcaaaatcagagccaaatgacaagacgacttgcttcagattctaggaatcagcccagttcagttcactctgtggcttcatgatgggttaaatttcatgatgggttaaacaacttcactcatctataccttcaacaattgtgccataagtctgaagtctatgactcaggcttcctgacttcagtgtctgatcacttgtttttattatgtttgtggtgtcccatgtcccttaaccttaaaatgcacttacctatgaatgttacattgcaggtatccactcagtaacctctgaagtataaagtcaatgaagaaagggtgctcttttgtccgattcttatttaagagatagtatagctttgtattaagaacacaaaatctagaagcagactgcctgagtttacatctcagcaatgtgacctcgaacaagctactcagcctagaagtgtcatgatttgttttacaaaacaaggatgataattatcatagcgcctaccacataggttttgagaatcaagtgagttagtacatagtgcttggaacagtgcctgatacacagtaaacttcataagccttttctttttgttattatttaatgtgctcacatcaaaatgtccaaaatggttaaaaaatattcattgatgatgatttactctgactagcaaggagttggtgctccatcaatgtttaatgaattgagtctaaagcaaaaataaagatgacaaaagtgctgaaacattttaatcaaaattttctctaaatgtaaggtttttattttactacacacattccaggatttgtttggctaaggggattcagaagtacctgggagcttcaatttatatcaagctgctaattaattaacttccaaagaaattccatgggtaattggtatgatatgaaaatcctagtgtgctttgtaaccccctttatctcaggtaaatcagtttccttgaacacattgcaatagcgtttactgagttaggtactctgtatgcgtgtggttgtccaattctaccaacaccataaagaatatattctatcatcatcattttagagaggaggacatatgcccagagtcactcaaccaacaggaattagagtcagtacgaaggcacaagttgtcttcctgcaaaacacaaacctttcaattgtccatgctaatcatagttaacgatcattaaaacaacagcccagattgaactggtgggaataaaaaggcaggaaagtggtgtttaatgcttcttccaccacttagaggcaagtcatttaacttctctaggacacagtatcaacagaaaaaggacactaaaccacttttctgaggcaaactgagccagttttcttgcagtctctttcaggtccatggtatttattattttcactgatttctcttatttgtgtatttgtatttgttgagcatctgttatgtgcaaggcacagtgctggaagctccacaaaatgaaaaaaaaatgaaataggatgtaattctttgcctcctttgagactactggtgataatgacccataaagctcggggagtctaccctttagttaggggaggacacgtggcaagtcatagtcaccataataggctgcagtagcagaggagaagtgcagtctgtgccagttccgaggaggcaggaagcataatgagtggggaccattaggaaaatacttcaaggtggagatgccatttaaactgagctttaagagttagagaggggacattctggctggaagagaatagagttggctgtagggagatgggaaaacatagtgtcttcatgaaacaatggtcttccaatttggatgaaatgaagaatgctggaagataaagctaatttagattgagaaggcaggttaagaggattagtttgcttatgaagaaagagaaaatctttaagctttttagatgggtgtgaaggcttagagctccactttaggaagattaactcaacttagtatgttgagtcctttcgagtctaggagcttgagagaatcctggtaccactgatgggaaataggaagtccagaggagttggtttgtttctcttaccaccaaattcaggtttctatgtatttaatttgaagaactgtagaaatgttggactggactttaggagaaggagcagaagtgaggaaagagaggaaacagagccaggtacagacctcagggatgtacacatggagttagttggcaggaaagagaagccagtcgagaaagagagaagcagcaatcagtggaaacagtggaaaagcagttctgtgtttgggggtaaaggagaaagaactgcagaaataaatgaacaccactaaattgtaagcttcttgagagtacaggttggtgacattgttgtaagacaatctgtttatttaaatatttcgcatgacaggcatggtacagtgtttctcacattcttggcactcagtgaatgttgactgagatctatattgtgcaatgctacacaaggtttgaggagagggaagactgaaaagaccccttgtctttatgatcaggagatctttggatattgcttctgtatagtgattttccaccctttctgttttaagaaatataaagaacaaagatattattcatatcaaagattaaggtatatgcaacattgcctctaggccatgtgatctgttggaccatgaatgtaaaagtgtctggttttgtaatagtacatatcgtccctcagcactctgctggtttgtatgaacatcagtatgtttgagaatgagtgcaggaaggtggaggtaaccaagctgtccatctctagaaaagtccagtgtggtgggtgggtgggtgcacacaatgaaatagtaagccacaccaaaggccccgtactagatggaatacagtaacacagttgtatcttgtaaacatcatgtccagtaaaaaggagtaacaaatagaaatgagtagaaaaaataggaaataagtgagaattataagagaaataagaagcaaaaacagaaatagaagctatagcataataacatctgtgtaaataataacagactcaaaacaacactgtacaacataacacaaggacacatacatagccaaagacatattcattacagtgaatatctcctgggggtagtgagggaataaacatgctaatcaggatgatggagaaaatcagacaaaacaatagaaggaccttgaaaagattaatgatgaggtatgtgattaattcatgatttgagtagacatcaaaagaaaaaagggaatatgtgatggagccatgttgttttcaaatctcaaacaaaggctcatacaataatcacagggatactatataggttttacatttattatgctcattggcaaacaaaaccagaaacaacatatattatctatagtaaaattcgtgcatatcataaggcctattaatttgtacttcaactatatggctcaaagtgacatcaggtgtgttggggacagcaagaagggtggggctattcatcacagtagggacagaaaagtccacatggtgccacccataggttctttcaacatgaagctttccaggaagcagcttaggttaggtagacctcaacctaatatttaagactatcatctaaggcattattaatacttgtgactattttctagagcatcacatattatgtaattaacaagcaggaattcagtactgacatttgcattttagcttaatagttacatttattacttcttttcattaaaaatgtgtgttctagcaaattcattttctacccattcaaataatgagattatatctcatcaaagtccagtccaatttgaacatatctgcaaagatatccccaatacatagtgattggtagaaaatatgaatagaggataaaagatggtttacttttatacagcatgcaggaaccatgatttcacacgcagcaaaatgaatcattctgcttcttcctcactctttttaaattgaaagttagaaccagcaagtcatgcaccccccattagaagcctcactgaaggtctgaggagctaaggctcaagatggtgtgtttttgccttgactgctctcaacacagtattccatctgctattcctttgttccatctgctctttcttaaacctgtcttgaaaagaacaatggctatcatcatcctctgtctcagagatgatctccatcttctgaatgatcagtttaatgagctcatgctgtttttccaggagaaaagtaagatccttcagcctaaaaggacatacacatttcatgaatttattttcagttcttcttttagcccttctgaatgtaggaaggcataggttttaacctcggtcccttctgaatgtaggaacgcataggttttaacctcggtagtcacaatccttccaggaaacatgtatttttgaagtttaaatgatttttcccaaagttacactgttagttcatggctagtttatttttgttcccagtttataggtaagaaactattatagagaaaggttaagcagattgcccagggtcacagttattacgtacctagttgaataggggtttgaactcaggtactaactaactgtaaaaccctcatgcttaatgactgcccaccacatagttactccagggatcttcagaagctttcagagctttgctttatgaattcagatgaagaatacagtttatgatactacctccaagagaaaggaaatcagcattttaatttttattcacttatgattggaaggcaaactgattggtgaatagtggcaaatatgttgttggttctaaaaaatgtctcatgactctcaatacactagctacagctatcaataaagcaagataatatataaaacaaaaacatcaatataaaatataatcttacattgtgcattattatttatgagttttaaatttctcaagtacagatagaaggaaaaatacataccggtatttctgctttaatatttccatttctaaagatttatcagcatttggtatttcttgtcttatttccccagtgcaaaataaaaaacagaatatatgctgtcggataaaaaatagtagttactcaaattgaattcaattcaggaactttttcttaagcatgtgccaaaattcaaccaccactggtaccaatatgcataaggcatagctatgccctcaaggaacccacaatctgctaggagaaagagacatgtgaagaaagagctgtgaaaggaagtcatacatataatcagagagaaataaaacatgtacagataaaacagaagaggagtaaattaggacagaaattgtttagaatgaggcttagctgaattgttctatatattttcatgagaaatgcccatcacggaaggtggtattctatacgagattcattgttaattatctaaaactgtactgcacattatccaatacaactcaaccaatcaacaaagtttcacctggagaaatttcagaaatgttattttaacacatttcattttaatttagtatcttttaaaccataggttgactggagagggtcaagggcaggtgtgaaatgatcaagaatgaggtaattctaggagttcaggcaagagaaaatggtgacttgcacaggccatccaggaagtcaaatggaccagactgaggggagaatgaaagggaggggacagatcaaggatgactcctgggtggctggattgcacaggctaatgaattgtgctgacattgttgcaaggaggaaccaggactttttcattttttcctgtaggggatatgtcaggagagggtgaaacgtgaaagcattgaagtttggttttgaacctgctgaatgtgaggcacctttaaaacatgcaagtggagatgtcaagtaggcagctggatacagggtccgggaactgaagagtgagctctaggattgagaaatcagttgctgagcattctgtttcggtagtaattttaaccatggacatgtgtgaaatcagttggagagatactgtggcgttagaataaagcctagactgatactcagggtgactttattattttatgactacacaggggaaattaacctgaaaagaactcaggaagaacagtcgtagagatgaagggagcccaggcatactaaggattagcaacctgttattctggctcttcatatggcccttcttccattataatgcaattgtcttgcttagtctttgatcacttaattacctcattttctatagtggatgctgtgtgtgtgtgttcgtgtgtgtgtgtgtgtgtgtgtgtgtgtgtgcgtgctatgtttaggctttgtgtccccacccaaatctcatcttgcattataatccccataatccccacgtgtcaagggaaagactgggtggaggtaattgtatcataggggcggtttcccccatgctgttcttgtgatagtaagtgagttctcatgagatccggtggttttataattgtttggttgttcctcatgcgttcgttctccttcctgctgcctgtgaagaaggtgccttgcttccccttcaccttccaccatgattgcaagtttcctgaggcctcctcagccatgcagaactgtgagtcaattaaacctctttcctttataagctacccagtctcgggcagttctttatagcagtgtgaaaatggattaatacattgtatgtatagtgtgtgtatgtgtaaatgtgtgttctttattgtgtattctaaacccttggctgtatatactcacatatatatctacacataaatgtaagtgacatgtgactaggaaaagcaaataaagtatacctgtactgtaaaaaagacactaaaagggtgtggctggtcccctgcccatctgctctcacagggacagcacgcatttaacacagatgctatggatgaaccacctgaaaggggagagcaaacgtcaccctcctctcacccagctctttcatgtcttggtttaatcatatcctttttttaaaagcacaactcctctgcccacaggcagagaagactcaaagtctataaaagggcccccttagggttaacacaatgaatgaatgtcaaacagtgtcatgttactgatgttgttatttgttatgtgtacttacgaataacatcccaccagatctgggtttgttgggatacacgatggtggatttctgatccactttgcgtagaaaccaaagtggcagcttcttctctaagctggtatgaagttccacctaaagtgcattttggatttattgatagaatcattagttagtatatggaatttttatatggcacagaggcaatcattaatacagcaaaatgaaaactgatttctatgtcctgacttctgtgccacagctgggctggccaggctttcttatcccctagctcacagtcacctgccccttcctctcacctcacccactgacagggcagcaatctgccttggagtgggagaagaaggagagggggaagttgcttaaaaaaggaattcaattttagtcacttgctgtttattgttcagggatagtcacccgatgttttattgttcaatgctggagatttaaagaagaaaagggtagttcatactcttgcggtgttgcaatactacaaaatgtgcacaactggacagtgtgaatgcgtgtgtgcacgtgcacacatgtatacacatctagggcaggagagaagaaggagtgcttaactggaggaagacaaaggtaagcagtaaaagaattagaactctcatgcttaagagtatgtcatgcatttctcatgtctgtgctatcaggtgcaaaatggtttctctatgatgaattttaagtataattactattttcagggatagcaaatgagatatttcctcacatttaatttttttcatttatttttgccaaatttatctctgcttttttacacccctttgtatctgatgtataggtatgtttactgtaactacttgtaactactagtgagatttgctttctaagaacaaatactttccaatattagtgatttatagccataaatagtgaaatggtaagaactttcctgacaccactgcttaaaattgtggccccctcactgtcccccaaatgactttcccccatgtggcttccttgctatttttatagcacttatcaccatttaacatactgtgcattagttccagcttcaagaaaagctatgttttcttgtattttattaataataccagttaaatattttcactgattttctataataatttctagggttccttttttcccctttgctctttagggtgatatcactttcctcttcccatacatatagttttagaggtcacatactatttcctcacacttgattgaaaaagatttactcaagctcaatgtttgccaacagataaaatacatagtgtgtcttacactgttcattatctacataggtccctcaaagatggtcctgggggaggttggcaagcaaagccccaagtccagtgtgggtcaggtgggacccactgagcctggcaccactgggctcagggagcatctttacctcctctaactggtggggtttccatgttgaagggtaagatgcacgctgcggatttccctttctaatttgcagtggagatataaatgtttatggactgtctgcagctgccaaaactgtggtggaaagtggagataccaacatttaaaaatacccaaacagcttcaagcccctcaaaatactcataacacctgcccctgaagaactgacagtccccataaagaacccatctcccagcatgcattgtcccaaggcctgtctccacttcccttcgagatgattctatgagagaactaaatggccctgtcagaaatgtgtgctacttgtccagttctgctcacagttctgccatgggctcagacataggtttcagaatggatgcagagagttgcttaagaaacaactcaggagaagtaggagaatggcttcccggttttccaggcgatgctgtttttgatccaaaacaaggcatagaaaatatggggggtactaggatttgtgccattgactgtcagggagcatagtaaacaatataggtttgtgcttttcagctcaaccccactgacactttagttcagtaagcttccccaattttgcttgtattattgtttttatctattccccagggtattttaaagagctgttagggcagttatgaggtattgctgacatacctgccaagaggtttatacatctcctctccatatccatacacctggagtcctaaacaccatctttgtgacagtaataacctgccattagcttttcctgccttcaatctttcctcactaaaccaagataataacagatcactataaacaccattttcattgcagaagggctgataataactctccactaacttacaaaataacttgaagcacttcatcatttagtgccctttgctaaggtttttctttgctggttttgaataaacccccctatcatctgcagcaatctaatcacccactaacatgaatgatccttccaggcaaaggggccttgggccagtgccttggccattttccctggttctgatgtggccctttgctcttgctggcccctcctttcacgacggtatcgatgtcctgttaaatcccaaccatctttcaacactgactcatctcaccccctccatgttgcattctcttaattatttttgcattttttcctgtacctgatcctgtgtttgttctctaagtgttccaatcgctctgtgtctctgtataatatacagccatgtcatagaacatagaatttatgaatggttctcagttgatttttgatatttaattctatgaatacctagctggtgtgctaagtaggcatagttgacttaatagtcagggatcacatccctctgtttcctctgggctctcatgataagttgtactggactttgtacatactatgtattgaaacattgttttcaataaataaatgttagtgtgtggctgaatgaataacagagaagaaagaatttggacaaataaaagtgaagaggagacaagagtgaatagaaagttatatcataacatgatttttctctctctcaaactggccaaagtttctgaatgcgtatagtcaactggtcaccaaatatcctcgaagcatcaaaagtgcccatgtgaatttgaaatttaaagacaatccagtgaagagcataaaaataactttgtgttgtatgacaggaaggcacctcacaagattcaatagccaaatacctagccaggaaactttgacaccaaattttacatcaaattgtctataaaaatgagagagatgtcacaagagaacaaaacctcatggatgcagttaaaacttcaacataaatcatgctgtggggaccctgtgattccctgcacaaaatataaggagctcctttgaacagcggggctaggatgccagtgatgctcttgatcaagcagctagctacctgggtggccacattttaacataacaaaagatgctcaggcaatttctcaatttctctaagattgttctcggacatttttttgtatcaactttgattagagcaggtataccaggtaacatgcaaacagacacaggatgtgactcctcaggattaagaaggtatccatgctaagtaactgtgctcttaaaaaaggaagtaacgataatggtgttaattccagtaagtttaaataaacgtgatgcagacaatacctaacttaggttggtttgactcatgatttttgactttatgatgtgtgaaagtgatgcatattcagtagaatctgtacttcaaattttaaactttgatctgttctgggctagcagtatgtggtattctcctgggatgccgggcagtggcagcgaggaacagaacccagtcagccacatgatcaggagggtaaatggcacatactttacagtgtaagtagtataaatttataactggcatattcctacaaaatgcccatttttgacttgtaatatttttaacttattgtgggtttaccagaagataacactgtaataagtggggaggcactgcacttacctgcatagctatcctcttcaatgatgcatgtttctggacctcagcaatgtcgccaactgccaaaccaatctgaagtatgacacaaaattaaatcactacagttgaatggtccacctaaaaatgcatgtaaggtctgtcttagtccattcagactgctgtgacaaaatattttagtctgggtagtgtataaatagcataagttaattgcttatggttctgcaggctgggaagtccaaaataaagactcgggcagaactggtttctggtaagaacccattcctcataggtggcaccttctatgtgttcccatatggcagaaaggcaaaggagctaataagctccctcatagctcttttataagggaactaattccattcatgagggctctcccctcatggcctaatcacctcccaaaggccccaccttctaatgccatcttcttggtgattaggtttctatacatacattttggatgggacataaaaattgaaatcatagcaaggcctctgtggctaaagtgggagactgggcatataatctactagtagtagctgcagaatactttggtaatacaccttacagaaaactacaaggcctatatacctctgcaacgatgatggccacattcagaggttcagtactcttaagtgttatgaaaacttaagacatacaaattaatccaaaattcatttcatttaagataaaaatctgttttttttaaatgagagggatgatgtgatatcacatgcaattgggtgtggccacacaacatggtgggaaactccaggagtttagtaactaaggtagacaagagtgatttaacaacatggaaacaaatactaaactgagagaatgatacattttatatcttacatatgttcagaaggaaaacatatactataggggcaggagaggctctggtgagaaaccagaaatttatggctagatagaattagctggggggaagctgttagctcagttctactcagtctgatgaaattagctcatttcactcatccatttattttctggtacttagttcctgcctttgctgagccagcatcttgcatgctgcaccagaaagaaaagtcagtgactgctcttggggagctcaaagtccagtaagctctatgagacaagggatctgtcaaggtctccactgtatgcccagtgcttagtatagagcagggtacataataggtaaacaaaacagtcacagaatgaatgaagacagggagaatatattctagggcttgaaaactagcactgagaactggatatagtcaggaaataggtttcactggacaggataatattgttttggtttttaatttgcaagtgttcagatgggtgttctctccaatttacattgacccccatcaaaaccaaccatctctgccaggcgcagcattttacatctgtaatcccagaaattggggaggctgaggtgggaggatcacttgagcctaggagttccagaccagcctgggcaaaatggcaaaaccccatctctacagaaatacaaaaattagctgggtgtggtggtgagcacctgtagttacagcttctgggtaggctgaggtgggaggatcagctgagactgggaagtggaggctgcagtgagccatgatcactccactgcactctagcctgggtcacagaatgagatcctatctcaaaaaaaacaaaaaaacaaaaaaaaaacaaaaaaacaaaaaacaaacaaacaacaaaaactaaccccaaaactaaccatttcatacctgctgcttcacatattttagatacatttttgggctctgaagacatttgagcttataagccatagaagagatgaattattaacttttgatggtcactaacatttatcaaatgcttatcatgtgccaagtactattttaagtcccttgtattagctcatttaatctatacaataatctaggaagtaggttttattattattaaatgtttgtatcctcaaaactatggtaacacaaggaaagaacatccaatagagttagttaattggagaggggtggtggttaaggaagtctgacctgaagaaatgatacttcagctgagttttgaaatcttagagctaacccatggtgggacgtttttcaggcaaaaggaagagcctgtacagagtctaggcagcatgaaggaaagtgtggcacaatcatggagtgtgcatttctgggtaaatcctgggaacagtgaggcgttgggaaagatcttggtaagatccagctcacagggacctttgcttgctatgctgatgggtttggactgaattaaagcttttgaagaggcatggaaaatatttttaaaagccactgatgtgttcagtttttcattagcagagcatcactatggtggccatttgtaggaaaaattagacaaagcagtgtgatacgatagagatgctcttgaggctgctgcagcaatttggatgaggaactatggcagtccaagccaaccggaagcagatgtgacagccaaagaattattgaaagaactgaggaaaaacgtgggagagtgaaatagagactatctgccaatgatcttagtaggatgactaggagattctactgagaggcagtggagattctgaaggaaagataacattagtcttggctctgttggttttgattttcctccaggatatccaggtagagatgcacagcgggcgctggatgtttggatcttcagaatggggccaacctgtactactgctaagcccaattctcttctggataattatcttccaaagcataaacaattattggagaacaatgtgggctttatgtcattctccgttattcctattgccatcctttctttttctaggtcaccaaaataaaactctggagatgtatcaaataattgaatcaaaatactcacacatctgcataattttttttcctttccaaaagcactgcctagtacagtctctggtacatagtcagactcagagaaattgtgtggaatatgtgcatgcgtgcataaatggataaaggaaaaacaggcacaacgatgccaataagggctccccatggacctggaatgggatgcacctttgcctgcatcagccaacgtgctcatgccttgagcagattctgtagagaattccatgtggaagggcactctaatgtctgctgatagtgtctaggctttgactgggttcaaggcggcatctgaacgtcgcagatgccctctgcatgagagacttccccacttgaatctctggtcaatggtaagttcgagcatagagatatgttccataaaggtctctgcctaaactctgaccccctctccaactccaaaacatcacacaccttcatctttattgcctttccctgcttcttatttcttcatagcatttatcaaccccatgacattatgctacacagttatttattacctaaattcctgactgtttgtaatcacactgagactgaatattggtctgctttcttcatcactggttcctagaacttgtaacagttgctggcatttggtagatccttggtatttgccaagtgcatgcatctttgcacgccctgagcctcttgatgtgcctggtgctccccaggcaccaagtgagtgttgaacgaatagattttgtagtagatccttcctgatctccccagtggaggaagattaaagaagttaaaaatgattatcattataaaatgtttcaaatgatcaacaaacagaaaatataagaaaaaactacttacaagtaaattcatgaggacaattgggacaaatattgtgaaggaaacaagttgtgcaaaggacagaactggatgtgccaattcatttctcagatatggttctaggaaggactctcgataattgatatctcctagcatcatgctgaaggtctggattatagaaagcaatggagagctgaagggatcctgaaagcagacggtgaggtacaaatgaaatgcaaagtttctacaatgaaaaagtgtttcctggaggtagaatgataaaaactatattcagaatacttttttaaagtcataggcatatagctgttgaaatgcagtgataaaatatagtaaacatggtaaagtcatcaaaaatatgttatctgcataaataataaatcatctgtgttgtacataaactttttgacaatggacaaagttgcttaacacgactatacttttttctgcaataaacgtcatttgaaagatataggagataaaaactaaagtatttgaatactgttgttatgtaattatgcattttctagactatttagatttaaatataaatatatatttccataattcacagcgacaaaatcaactactgatgtaactgtcttacctgtaaattcaggaggatgtaaaagctgagtccaaaagccagaagaaggaagataaatacaactgtagacctcaacaaagttttcaaaattacctccaacataacaataaaaattccacaattttcaaatctagaaaagtaaaaaaaaaaaaatttactcacttttatagtcaaagtgtattcattcagtgacaatatttatcatgtattaaaccaggtattagatttcacagatgagatcactgaggccagttattttgaaaaagaaaacataagaattaattgaataatcatgtcttaattttcaagctgttagtcaaattacttttgcttttattctcattattaatgttatctattttttggatacagggtcttgctttgtcacccaagctggagtgcagtggggcaatcattgctcactgcagccttgacgtcccaggctcaggtgatccttctgcctcagcttcccgagtagccgggaccacaggcaggcatcacccccaggctgatcgtgaactgctgggctcaagcatcagcctgcctcggcttcccaaagtgctaggattgtaggcgtgagtcactgtgcccggccctaatgttaccttaaatcattttaccacttgacaactggacattacttcaactgaagtaggagagaaaaataatagcttctcaatatcaaagaaaatgctgccaaatgcttaataaagaaattagagagataaattgtgtgctgcatcatgcagagactgagtttgtgaactggaagtcacctaatgcagggcacacactacatgatttgcattttatcctcaccatctccttcggttttcttttctaccccctgcatcctatattgtgaaatgtttggatagataatgggtgtgtcatctggcctctaacttgtagtctgcctttgacaaagatgacttattaaatgaggaacttacaagattctaaagctgaaagggacttcagcgaaattcacagagacatatatagtgactcagcaaggccactaataatgacagagccaagggtgtgacagtgcctgaacctgtcttaaatcctatttctgggccactgcctttctcaccataccacgtactctccaaggggcggcactcaactctatcactgtgcttatgacacagcaatgcagaagatatatggtgaaaaaaacatgcttcctggagtcagaaagactttgggtaaatacctgtatcctgactgactagctgagatcttcagcaagttactgaaatcagtgcttcagcttcttcttttagagaatgcagataataacattggccttgttattggaaagattatgtgaaataacatgaaactcaacattaccaactgtcagaggcccgggaactcaggcttttttccctgtctagaattagattctttgggcttattttttcttttataccacttcaattccccatactatccatcagttcattttgagtgttttaattcaaagtaaatgcttacaaaataatatcaggtaaaacaagaatagccaatacttttaatatttactccccctgtttagtccagatttgtctagaccagtgttcttgacctgggctcatttggcacacagggaacatctggcattgtctgcattcatttttggttgtcataactggactggggtggatgctactggtatctagtgggtagaagccaggagccaggaatgctgctaagcaatttacgatatacaagacagtccccctccacaaaaaaaaaaaaaaaaaaaaaaaaagaagaagaagaagaagaagaaaaaagaattatctggctacaaagttcaatagtgccaagtgtgagaaaccctgatcttcattctgaactctggaaccatgctccagcctttccttaatagggtatacaaaaattcttcatattttgaaacaactggaaaaggaataagccagttttaaatttacaccaggtacaatagtttttcttttgatattaaaaatgcttaaaggatgtggaaataattcaagcttgttttacctttgaagatacaataagaaattcatccaatagaagtaaacagcaattgctccacattgccactgcagatgagctggtatttcaacaaacaagggcagcacaaaaatgatgcccgtcgtgtagataatccattcaagaacattgcttatatccataaaataattccttttctgggatagaaaagaataaaaaattaccacatatagagacctagcatctatggatggttatatacatgcaccccgtaatacaatttttctagctttgcagccagctggggagaagtttaggaccaaggagtaacctcacgccatcctggattgacttcagagtccccggggtatgaatcggtgttggagatggcccagagccctctgttaacctggtgttatgggaatccgacgcctaaggaaatcctacaaattgctgggctttccctgtggagtccactccatcttaagaaaacttcttggggactgcaagttggttcagtaattcctggggcctttctatccgtataacaacatgaatgtggagctctctttatgaactaaagttgtttctaaaaaggtttgggacatgcactgagacttaattaggaaataaaaacaaataataatggtattttcaaactttttatgtattggtcattaaatttcctatagagtaggccacttaaatatcaataagaaaatgtggagatcaaatctgatagagaattcatataactttatagctcaatttaaactataatctgcaattttcatttctggaaaatgaaaataatggcaagaaagattaagtaatgtgccttaaatcgtttaaggtaaaatgcaacattacagtctatcagaattgtgacaaatttcttaatgtacctatatgaaagtacttgcaatgtataatatttaaaaaatgcaaaccattattatcaaatttataaatgcaaatatctatgtgcttacgtgatgcaacaaagaaaattttcacagaaagtgaggtgttgtataaaagacatatgatttataaaaataatattcatgaacatatacaaaaaaattataaagactttcaacctccatactgagaaaagaaggatcaacttttgccatttatcaaccaaaggtaggacctgcagataatttatacacttggttctgatctgaacttggctcacttatttaaaaagtggaatataaagtaaaaattttgctgtaaaaagttccaaaattgtattaaaacttggaattttatttaatcaaaaaagtatttctgttagaaaaggaattcaaagaaagacccatttgaaatggagtcttgggccagataacttctttataaacatttacatttaaaattatcaagttcaaaatgtaaccattatgttagcaaaatctttaaaactatgtaagagaaaagaaagttcactcataatgaccatttgtagttagatgtttaaggaccagtaaaagtggaacatctctttcatagatatatcaaataggcagggaccttacctaaaatcatgtgatttctacattttgaaacatttatgcttggtgtttctaatctatatggtagtcaagctatgtaattttattatgacataatatctcaagtaatagcttatcaattaacttatgttctgcatatgaaaatatgtgcaactttagagatacaaaatgtattacatacctgttggaaaatttgccccgcttctttgcaatacccaaatatacttgataaaaacactaaaatcatacaagtttttattagatatgaattctaaaacaaaaaaggataagacacatagttatgagagatataaaacactttaacatttccataattttcactattaaatttcttttttcttttttttttgcttaatttctatatactgtccactttgagttaaacagaaaatttaactgacaccaatactcatataatttactagagatgaacacaccctcatttaggaatgtccttattaagtgaagttcaaaaattgctaattgaattaaaaaagaatatgaatctgtaggccaatataaaattatttattgtggcaaaatacatataacaaaacttaccattttaaaagttacattttacatgtacattttaaaatatataattcagtggcattaagtatattcacagtgttataccaccatcaccgttatctagttccataactttttcatcatcttggatggaaaccacatatccataaagcatctctccccatttcccatgtcccacagtccctggcaactacaaatctgctttcttgtacacctattttaaagttttacacttcagtatttaagctagcatctaacacatgtcaattctttttaaattagtttacaaactcattagttgacctgtttgtttatattccctctccttccacaaaggattttaggagaaattattactgtatacaaattcttacaggctatttataataaagtcctgatatgtcagatttattatgggtttagtagtcttaagaaaaaatacattttttataatcctttattttagaaagttaaaatttgaaattaccgtggtatctagtatttctgaatgatcactagtttcattgatgatgccagttgagttgaaagccattcctggttttatattgacaacgagaatggtcataggtatgagaccaagacagtaagatcctaaattcatcatatgagctctaaatccataagccaacctacaaaaatataagcaaaccagaattgagtcatttcaaacaaaaatatttacttaagatacctggggaaaaaatggttataacctctttcagaaaccttgttggtaaattcactgaagcttaagatcaagtaaatcttctaattcacctttttcattttcagagaaggaacctcaagttctaagcaaattacgacttaacaaattaatgaaagagccaggatgttagcccatataatctgtcggcaatatgagtgctcttcctagaacacacctctttcttcattgtcagctaaatttcagggtccaggatatttctacatgttctatacaatgatcctttccatgcccccaaatatttcatttaatgttaaagataaattttaggctctaaagagcttcttcatgtcttatataataattccctcccaccctgcaaatattttatttaatgataaggataaacaatgccagcattttttttaaccttaacttctttttatttggtctttttcactttattttattattattatactttaagttctagggcatttgccttacttatttcttcaaagtaaaaacattaaaataacaaaagctaaaacattaaaataccattacaatataattgttttgaaggctttgtaatagatccaatagacacagcattaaacaagaaatactactcaatacccaccatttcatgagtaaatattctttacacacaggatgattgagaagctctatgcggttattttgtaccattgcctgagaaataaaaaaaagtgtaataaaaacacaatcataatcaactactgagtataaactaatctatttattgtctggttttataactgtgtttggtattgtaaaagtaacacctattttagaacattgaaaaaaataaaaattagatcaaggttttaaaaaacacaaattagagataaccattttgtacaggtaaaattgtttgattcagtctgtttctttagatttctgactacttaacctagcataagctttttaatcttatacaggattacaacaggaaaggacattaaagataaattagcaagagttataccctcattgtgtccttgaagaaattcaggcttatctttccagaaggattttatgcagtagaatatacatacatagttgttcaattaatctagatcataagttttcattagagttatttgtgactactagtatttatttaaaaattagtttttaattattcaagacatacataaatagagggactgatgccaacaagggagcaaaataggaagtcccaggccctccttcctccatagagatatggaattgaaaacaatacacagaacattttctttgtgagcaatcccaaacttagttaacgtgtttctgtacccaaggtgagcatgtagccaaaatcaaccatatcaaagacagtaggaaaatgcatggcctttacatgccacagatcctccgtctggcaaagcacagtgccattgggagaaaactcccaactcctgccttctccctggaaagagaaagaaaagagtggaacatatccactaacttctgacttctaaggggctgcccaagggaatgatttttatcttgcctgaatctaagctctgacatgaatgggtctcaggaggggaccactgataacaaagtagatcactgggtcttagtctagcaccagagaagatagagtgtcaacagacagatcctaggcagtgtcccagtatcatgacttgctacagcatcaaagacacagggaaaaagagacaaaaagtctaccacatactgaaagcaattaacaaaatggcaatagtaagtcctttcctgtcaataattattttaaaggcaaactggttaatctctcctattaaaatacaacggttgattgaatggataaaacccaggattcaactacatgctctttacaagagactcactttagatataagaacacaggctgaaattgaacggatggaaaaagatattccatgcaaatgagaacctgaagtgaaaagaaacagccatatttacatcagacaaaatagactttaagacaaaaactgtgagaagaaacaaaggacaatatataatgataacaacgtcaactcaccaggaagatacaacaatcataaatatatacccacctcacattagagctcccaaaaatatggagcaaacttagaactgaagggagaaataaacagcaacacaataatggtaggcgacttcactatctgactttcagttatggatagaacaaccagacagaagttcaataaggaaacagaagacgtgaaccacagcatagatcactttacctaacagacatacacagaacagttcaccctatgatgcaacagaagaatagatattcttctcaagcacacatagaacattctctaagatagaccacatattaggccatgaagtattaaaacatttcaaaagattgaagtcatataaaatatcttcctcactacagtggaataaaactagaaatcaaaagtagaaggaaaatatgaaaatcgaaaaacctgtggaagcttaacaactcactcttaaacagcaaataggtcaaagacaaaataaaacagaaatttaaagtacatctggaaacaaatgaaatgaaaacataatataccaaaatgcatgaggtacaactaaagcaatactaagaggcaagtttataatggtaaatacttatgttataaaagaagaaagattttaaatccataatttaacttaaaactcaaggaaataaagaaagaagaacagactaaacctaagattagcaaaatgaagaaaataataatgattagagcagagataaatgtaatagagaatagaaaaacaatagaaaaaaatcaatgaaaccaagaattggttttttgaaaagataaacaaaattaacaaaattttactgactaattaaggaaaaaggagagatgatttatcgactatgacaccaacaggacaggcaactaaagcaaaagcagacaaacaggactatataaagttaaaaatttcttcaagtcaaaggaagcaatgaccaaagtgaaaaggcaacctatggaatgagaataaatatttgtaaatcatatatcttataaggagttaatatccagaatatttgaggaactcctacaactcaacaagacaataaataacccaattgacaaatgggtcaaggctgtgaataggcatttctccaaagaagatacatgaatagtcaataagcactattgtttatgactattgaatgagaagatgctcaacatcattcattattagggaaatgcagtttaaaaccacaacgagataccacttcgcatccgttaggttggccactatcaaaagaacaaaaaataacaagtattggtgagcatgctgagaaactggaatctttgtgcactattggtgggaatgtaaaatggaacagtcattatggaaaacagtattggggttcctcaagaaattaaaaatagaatcaccacaggatccagcaagcctacttctaaatgtgtatatgaagagtttaaagcaggatctcaaagagatatttgtataataatgctatagcattattcacaatagccaaaaagggaaagcaacccagtgtcttcaacagacaaacagataaggaaaatatggtatatacatacaatggaatattattcagccttcaaaagaaggaagtcttgtcacatgctctaacatggatgaaccttaaggagattatagtaactgaaataagccagtcacaaaagtacaaatactgtaagattccactttatatgaagtacctaaggtggagaaaaatcacagaaacaaaaagtagaagggtggttgccaagggctgggggaaagatgatggaagttactgtttaataagtatagagtttcagttttgcaacatgaaataattttagacatctcttgagtaacaatgtgaaaatacttgacactactgaactatgcatttaaaaagagttaagacagtaaatttaactttatgctttttaccacaagtaaaaaagaagaaatacccagacaaattctcctttaaaatactggaacatcgggataaggccatagttctcaccacacctaagcctcagttctaggcaggcctccatttcctcaatagtatcatcattgcttacttgtacatccttccaaatccttttctatatttctacacagaaacacccatgttcaaaaactcaaacgtagttatagaaaaagggataattattttgtatttacgtttttactcaaattatgtcttcaatttgcttatttattcaacacagcctagaaacatatgaatgttatataaagattcatcaagaacattgtttttaaatattgcttaatatttcatcatttggatatagtagtttattaagaccttcccttatttataaatattattattgtttcacattttataattaaaaatgatgcagccagaatggtcttcttagcccttggggaagtttttaattttaatttgatgagttacagatttcatttctagaaaattctcagacattatcctttcaattttctccctatctttccatctctttttaaaaatgtccatctttcggaaataactgttagatagaagttggaatttctgtttttagcttccttgtattaactttgatttgattgtactttccaaaattattcaccaaacaacttataggtttttgcactaaacacccacttacattttgaaaaagcctatactataattttcatcagcactctattacattttttcaattttagtattcataaaaatcttttagaagcttatttaaaattttgattattaggtctaccctcaagcattctgggttagtaggtctaagatgggccttaggaaccttcattttaacaagaaccacaataattctgattcaagcagccagagattccagtttaaaaactactactgtgacaccaacaatggaatatttccaggttcaccatttttcttttctatttatttttaccccaaccatttgaaaagtaattgagatatatttatatacaatagtctggggggaataaaagaaccccttgcaaatattcattatcaattggatgcccagtggagcccgaaaagctatatatctagctattcttgggaaaaaaaaaaaaactggcaagatctagctattgtttttgagacctcatctaaacttccacgtagatttgactttttttccatttaaaattaatggtttcttcaagctaaaataaaaaatatggaaaaatatttgtgagagtaattcagaatgttactattaatatttttaaaacaccatactagaaacacacacagatacttgttttcaatgtgctttcattaaaacaatcctcttacgtttctgaaatcttgtaactctgcttttaaactaataacaaatacagaaaacctaccccttgaggcatgcaagtacattgttaagtttaaatatcacccaaataaagtgtaaataagacaaagtatccaatgcatttgtagctatgctaatggattttccacagtagctctactcttgcatgcaccattaatgaaaatagcctctcactggctccagtttgtcttaatctcagtgtctgatttcttatgttctctatttggtgcatctagactttcaaattttctgtgcacagtaatttctcatcaggccagttaccttcctaaagagccccactcagctcacttacaactaaaggaaggtttcataagctattaaggcattgcagaatcaggtgctgttttgatatctagtacattgcatttatctaagtgaacctattttatttaaattatactttgcccattgttatatattgtctttctttttagatgctacatagatcttatttcttcctattcttattctgataatggagacaaaaatagatacatttttttctgatagaagtattgcctatttttaaaattagaattaaaaaacacatacatatgcaacaaattttctaagtataactgtagtgtagttactgttagatcactgggctattgattatgaactatactaatagcaaaacacaacatactcaaggagagctaaagcgcttacagcaatggttagtcagttgccatcaccagtgttaaaggcataaaatccccacgagtctgcattctccatactccaagtgctcagtaagccttgtaggtttaacttgggtgacggctgctaccatggtctgtaccaaagtcttcaatttagggaaatgaactcattgaaggtgaataaaaattcttcattggcctagagcagtgtcgtctaatagaactttctgcaatgacgaaaatgttttctacctgtgcagtgcaatatgagagctgcaagccaaatgggctactgagcatttaaaatgtggctagtgttactggaaaacaaatttttaactttatttaatttaaactagtttttaagttaggaagccacatgcaactattggttcccatactagatagcccaaatctagaccaaaatttgcaactccagtcctcaaatatgttttgttttacatgcacacaattttaatttgttgccaatatttacacaattgtgggctgctattgccacatggcaatgatttgttgaagctagtagccactgtccttttaaccagaagcctaagttacttggctgttactgttttctctgtagttatttcagtttgagacctttgatttagactacagggggtcaaatgcattattttcattgcttcattggctagaaacataaaagcatctttttaaataatagctactttttaaaaggtttcttgggaaatttaagtctatgctgtgtcttaaaagcctgcttccaatggggttcattcatctggaatctaagatctaagaacctctgaatggtcagagtttaccttggagcccagtggctagctgaacttagaagctgtggctgtgaaatatcaccccttgcattttcctgtggtttacacaggagaaaactcttgaatatgtaggtggatagaggtggcaagcaagtgttacctgtgttgtccatggtttatttgattctggattggagcagttcttatgtgaccattagaaatgaagtgtagaactttatagcaattgaaaaaaaggattgctttctttattaacaaataaaggtttgagtcacatggaagatatagacatagaactataaaactgtaattctctccatccatcaagtattaaaacattttagactattgtatcaaaacattttagaacccaactagaaactatttagataatgagatggctgggtcaaatggtatttctcatatgtaactaacctgcacaatgtgcacatgtaccctaaaacttaaagtataataaaaaaaaaaaaagaaaaaaaagaaactatttagataatgaaaacattgaacttacgttgagggctgtaagcggttcatatataacatcctgtgtaggtgtttttttggtgaattctaatggacattgaagatatttgaaattatactcgatctgtagaagacagaattttttttaaaaaaatgtacagttagtcaagtatagaatccccaaagtaattcttgaaaaaatcaaatacacaaatttacaattctgctgaaaattaagtgatttgaacaaagttgagttatttcaagtggagaaaggaaattaagttattgcatattaattctaaaaataaatatcctggaagcctgttattcaattgctttgtatctcataggcatggaaagagaggagttctcaaaagatcatttagatcttttagatcttcattattaaggcacaactacttaagaaaacataaagactagaaacaacactaaatgatgctattagaaactattaaaatattcggggaaaactgagaatgtaagggaaaaattctctcacaagtagataatacaataatatgacaaattagatcaataccatctgcagtagattacagatcaatagtaacaatatttttaatatttttcaaagaattataacaaaataaatttcagataatgatgataaaataaacttacataatagtctcggcaggacttgtcttctgtggaatgcaacatgcagaaatctaaaagtacctttgaaagagaaaaaccagctaagatattggggcagtacactacatattaggaaagattttatcctatttctgaaataatacacaagacattccctttcctttccttggtttcttgcatctcaagaataaattataatctatgtcattcaggaacaaagtttaaaatacaaaatgttacaaatacctctgcatgcctcagaaataccagtgattcagaaaaaataccatgtacttgagaataaaattgcatgtactaaaatctaggcaagagatattccactagttgtgcctaagatttgatgtctttctggacttttagaggatatatagattacaggttgagcaatcctaatctgaaaatgtgaaattctaaacgctccaaaatccaaaatgttttgagcacccacatatttccataagtagaaaattccacacatgagtacttaatataaactttgtttcatgcacaaaattattaaaaatattatataaaattaccttcaggctatgcttttaaggagggtatgaaacacaaatgaattttgtatctacacttggatcccatccttatgatgcctcattatatataggccaatattctgaaatccaaatcatttctggtcccaagaagttgggataaaggatagtcaatctgattcctttgctgggtaccttactgtgacaacttattgttcttaatcaagatttttcatcccagcaatggagtctttctatggtttagttcccatcttctgaactgccccagtctggagtaatgtgtttgcttctatacctcatgtgccaagcaacacggagagagtatgtgtttagaggggggtggacaggatggtgggggatagatgttgtaatgagaaatagatgaagactctctagatacttaactcagggaaagaacacttatggggtcaatagagccacctctatggtgtgtgggaacaactgtttttgtggggctgcataaacaatttgagacacctcaaatctagtggtccaaatttatggtcctgagaaagaaatatcacctagccaggctgccctcttggaaccaggactagacaaaataccccatatggccccatcaatgcatctaggacctcctggggcatctggtgaacctgtagaacttgagggtagagggtcagactatatccagaagggaagaaacagggccatggctggtctcaggtaccaaagggactaagaaaattacaaggaagtctctgttggtgactagatagcagtactggaggtcacaacaaccatcatgaaaaataaagacaagactagccagtagtgctgtgcaaggcagaaacaggcaggtctggttgttatagtttgaaaactggataataatcaacgtgtgcaaaataaaggatgggctgtcttgggtgggggctggggagatttcaagagcaacttttcagaaatgttgtataagtatttcaaatgcattatgtccggctaaattaagacatgtaagttcatttattttgctgaaaagtagtcacaatataaaagtaattaagtcattatagaaaattacctagaaaatatagtagcataaagaagaaattaaaaactaatcctaatcctataacagataattcttattaacattttggtataatttcgactgtttactatgtttccacatgtgaatatttcaacattgttttacaattataaataatgttgcaggaaacattctgtaaaaatctgtatctctgattattcatcaagacagatttcaacaactgtaactacagaataagaaagtttgagattaggtatttatgtgtcctttgatgagatgtaggcacctaaaaagttaatctgtatgccatttgtgtactggactggctccaattttcattaggcatcataaaaaaaccgtccaaaatatttggtgcacaggaagtccttgttcaataaataaagaacaataagtgctagtagtactaataaccacataagcagcacaaaaatagtaggaggtatattatgtacaaaccattatccttagcactttatacattttacccctacttttgtaatcactttgtaagatcagtattagcatcattattttagaaatagagaaaacagaaaataatgctcagagaggtgaaatgacttgcctaaaacaacacagcaaaaggcagcaccaggattaaatcccaggacctccagaaggctccaaatctggtcttctattccctgtgtcattatatcttactgcctcctccagcatttgtatatatttttcctttgcatgacatctgaagtcattctgcctttcttggttattctgtctgtcccaaccctcaaatcccaactttcccagattgcttatttgcatcctttaatactcatctgctcaacaatttgtgcatgtttgtcttgtctggggtgtccggtcatatgctagtgtgtatttaacgtagcaaaaggggtcacatgtttaagaacccacagaagccaggcaagtaatgtaaatgaaagaaccatgccaggcataagagcttttttccattgttcttgagatgttggctatacttgggcaagcttttatcttcacagtttggataaagtcataattcaatacttctctactataaggaaagcaattgcataagaatgacaatatgtgacaactaggcactggagcccaatatacaaaagggagaggtggggcattttattttatttttttttttaatttttatttttttaccataccttaagttctagggtatgcacaacgtgcaggtttgttacatgtatacatgagccatgttggtttgctgcacccattaacttgtcatttacattaggtatttatcctaatgctatcactcccctctccccccaccccacgacaggccccggtgtgtgatgttccccaccctgtgtccaagtgttctcattgttcaattcccacctatgagtgagaacatgtggcgtttggttttctgtccttgtgacagtttgctcagaatgatggtttccagcttcatccatgtttttaaataggagagtgattgtcccatccatgggaagcagctggtgctgagcccagcaattcctgccttgtgagaaggcaggcccaggtacaagatctcattcttatgagaagctagatatttggaggaaaatataactggaagaaaccagataccttaaggaaagcatcctggtttcaaacattagcaattcatgcacatttgaaacaacaatagcatgcatgccaagcgaaacatatacaaaagctttaccagccaacaaacaccagtttgtagtctctgttacaggtgtagattatttaaataaaaaatattttaccatattattctctattacatataataactaataggattctttaatccaagaaggccttccttaaatagttattgtctcatttcccttacagcctatggaaaatgagaagctttgtttaaagctggaaattattattattaggttgtgattacaacaacatatgtcaagcataaacccgggaagaattttgttttagagaatttaccttcatgcattcagggaggtattctatcatttctgtaattggacatttattgcctggagaattatgactgaaaatcttaagacattcatcccatctgtaaaaaataaataagtaagataagcacaggtcttcatccttctgttctgtacaacagctgaaactcaagattatttctttaggggaaacctaaacttaagcatattcatgaaatgcaatgctcacccttggttccaatggaaccaacatgtaaagcaagatcaactcagtaataggatccttgcccattaatggacattaggaatgtgggcaaatttcaggatggctattataatcattgttctgtctctttatctaaatgccattcaaagaagctgggactatatcttctttttctcctgaagttatgaaatggtcagtacttacagagctgaccacgttgggtagagattccacattcacatgcctacaccatcagtgtagtactggtcccatatttaataactaatacatgtgtacatcctgtattgagttaaactacaaattaacacatgtaaagtgcattgataagcatagcctctgccagaacattccagattttgcccattttcttcatcaccatccaactgaacagggtaagacggtgcttaccataccaaggaggaactaaatctatggcaggaggcaaagaatggcccattatctccaagatcttatctaattttctgttaaactctatcagtaaaacccatctagtatatctacattatcaaaagaaaagtttggattgaacactttcattaaaagtgctttaaagggatgatcagtcggagattttttagactgcccatgctcaaaaacacaggcttgatgtgccttgaatatgagattgttcgctctgtgtccactactaggtgacactgggccctcgtgcataactatcagtgattattttagaaagtgatattataaagatattatgagaagtgagactaactatcctctaacttcatcactaaaattccttggagtatggtttagaaacccaccaacacctgaacccctggagtctcacaagagtgatgtgaagcttggttttatgtgcccacattttattttttaagaaatataaactaaagatcagagaggttaagcaatgtgcctgttgtcatccaaaagaattcatttataaatttaggtagacatttagaaataactgaaggagtataattggattgtttgtaacacaaatgataaatgctccatgatgtgattatcatgcattgcatggctgtatcaaagcatctcatgtacctgatacatatacacacctactatttacccacacaaattaaaaataaaaatggccaggcacagtggctcatgtctgtaatgccaatactttgggaggccgaggtgggcgaatcacttgagcccaggagtttgagaccagcttggctaacaaggtgaaaccacgtctcaatgaaaaatacaaaaattagctgggcatgctggctcatgcctatagtcccagctactcaggaggctgaggcatgagaattgctgaagcccgggaggcggaggttgcagtgaacagagatcacaccactgcactccagcctgtgcgacagagctagaccttttctaaaaataaataaataaaaataaaaaataaaaaacctttaaaaaattgatgtaaacaactgatattttaaattttgattaatggctgaaaatcatttcttttctcttattttgtctcagacttcaaatcatcccaacaccagagaacactaaatgacagtggacaggaagacagtgtaccttttgctcctgatgatcgtaagaacaacctccttcctcttattgtgaagtgcaaggtgcaaaaaggaggcctgctgcttgttcaggactatgtcagcattgtggctcagaagaagcgcaacggctttggcgtggccttcccttgcagcaaagtgaagtgcagtgttcttttgaagaaaaacagacacagaaaacgtggtgacagtgtctaatctgtcttatttcactgcttaactgcttaaaagacattagcgacactatttaataccaaaatacatagcacttaaaactggtgttcagaatcaagcttcaaaataatgagtttatagttctagcatggtgtgtgtgcatgtgtgggaagtggatctgtgtgtgtgtgtgtgtgtgtgtgtgtgtgagagatagagaaagagagagagagagagagagagagagagagagagagaatgaattccaaggcatttgttttgtgttgcttttgcaatgggatgattccacaaggacaaaggacaagctttcagggtaaagatgttgggttgaacacagaagaaaatcctcctgagattgatcatttgtagaacagtggcttacagatttggggcttcacaagcttgtaaatgttttttaaaatcagagactgttataagtttgcccatttttagtttctccacttaaagactttttttttttgaaaaaggcaacaacagtcttctatccccatcattttatgaacaaacgtacatttcaaaagttactctccccaaaggaaggaaagacataatagcacaataaagggcagcatttcaaatcaatacacttcaaaataacacttatcttaatgaaaactcacccctgccttcatttctctggacctaccagggagtaaacgctttaccatcaaatttcattggcctgtggacctcgctgctctgtgagactggaggtttccccaacattcacccaccccttggtattctcccaattctgttgccttttgattcatacttcacctcaagaatccacttgctaaacacccaacaaaaggctgggaatagagcaaggaaggtaaaaggtgtctaggagagttttctggcaatgttggaagtttctgctatattgagattttgggtaagcatgaggaccgcagtacataccccgtcttcatccaggcgatctgtgcacttcaaattagtatcaagaatgaccttcatggtctgagtgtacccgcccatggacgcatgatgcaaagctgtccagccattgtggtcactggtaaagagttaagaaaagatgtgtgcatacacttaacagatgaaatgcgggatgggatgccacttggcttattctaggtaaatctgatgacaacaaaaagcattattgagatctggcaactaaatatttataaaacatttataataaatgagctaattccaagctcaatgatcttaaatgacctatttctaatgtgattcatacacgttttttacttagtggtttaaaatatgaaagtatataaacacattaccaaacactttggggtaggagaagtacgcttagcatgtctgtgtcatacctaatttttttaaagctataatgaactgatacacatcaatttaaatcttgttttattctttcaatgaacactgtatcaaaatttttttatgaagtaatgttagtctttgtggtcaatagttattggtaatactactagtaatatgatacatggctataagatgcttagcttagtgtcagttattattctaagagtttaaatctaaaaagcttccctcttgtgctctgaaaaatgcttactcaattgctttgaaaaatgtttatccttttccacagaaattcaagatgtaaatacaacaaagccttgtcatattagctatcttttttcaaattagacagaaaaaaattcttgacactatttaatttcagtgctagtgagcagatgttttagggtgcaagagccatgttgctatttcagttatgatgtaattaagcaacaactgtctggcctgggtctacttcggtcccctttgcaggtcagttgcttggtgtttctttgtaaaccagaaaaaactgagcaaaacattcattcatgtagctgtagcaccaatttgctggcatcaatattatggtaaggaaatgtgtttttgaacattagcctaataagctctttgctactgctatggtaagatatcaaatgaaaaacctctgtaaaacatttccaggttttttctttcttatcacaatatcatttaattatgccacatattttattatacttacatattttaactttgtttcttgtacttgagttcatttaagtataataaaattcagaaatttttaccatctcctgttgtcacttaaagggaactttttatgcctaccattcatcagattgaatgaaaagtagagtatttgaacttgtatgttttgtgtgtgtgtgtacgtgcatacacacatacacaaccacagttttgtatctatataggaatatggcagcatgatgaggtaaaatatgagaaactatgtttcaaagaaaggttctgagaaagactgcacaaagccaattattctgtgaacagaatattcttgaacaaggttcttcaacgctataaacttcaaagtctttgtcagttggaaataatactgacttccctttcagtatttttagaagttacatatgttttgatgaaaaaataaattggataaaagtacttagtgagatataaagttagacctcataattaaaaatataatgaaaagatagcctgaaaatggctaattaaagaaattatataaacactccaatcatatatcctcacctgagaaacaatgcaccttttttcagaagaagctgaactactttatcatgtccattctttgctgccagatggagaggagtcattccatgaaggtcaccttcattcagaagcctcgtatcacttatgtcttgtaggagcctctgacaggtattgatacgcccataacttggaaaaaattaggtttcatattttcaaggcaaatattaaacagaaagaagacatgttcatacattgctagactgacccttacctggctgcaaaatgcagaggtgatttcttatctttgcttttggaatgaatggacacattaaagccaagtaggttatttacagaaccagggcccccctgtctacatgcataatgtagaggagtacacccatcgttgtcttcatccattaccagctctttgatctgttgcatctataggaaaaaattaatatcatacaaataactctgctattatgctaatatgatggttttcaaactattctgtaggaaaatattttccaacaagggtcaatatgtattccttggggccaaaattgtaaataacctaaaggatttgagagtaatataaatatgaatgaagttgaatgctctgtcttcatttagtgtacattaccatattagtgtacattactgtattaaaggatctgagagatcatgccaataggaaaatgtacttaacatttttaactcagcatttttcaaatatatttgatcatggcccttccctctgcccctcctcttatttcctcccacccccaaataacacccaacagcttcatgttaatatgttctgttaggtaaaatggatgggatgtaaacattaggtttattttatgttttatatgtatagtaaataaaaaatgaatgataaatgagaagcttaagcctatcaattaatattttgttattttttaaatattcaaacacatatatattttgattattaaatactggcaatattgaaatctattgatgataaaaatatgatgtatttcacatacatgtgctagtcactcagtaagtattagctggtgaatataaatataaaaataatgctttcaacctctcctcagaaagtcaagtatgctgagtaatttttcttaattgatggtggagtattgataattcattcttatatttggcttttccactgatatgcaaatcataatggtcaaagaatgaagaaaatcaaactaattaaggatgttatctttatcatagatgactgcatattaagtttctttgtaagttaaaaaactcagtctcactacaattaattatcattgtcataatcatcaccaccaccaccatcaccatgttgtaactaaatagtcaaatatgtcatctttattttaaaacatttttaaaattccagaatcagtttatataataacaaaaattataataaacaaaattagtttattttctgttgaacccaactcagttaatggcaatccacagatatacattacctgcataaattcaggtcgcagattttttaatccataaggttgctgtacagttaaatgcagaaaattacgtccaaaattatcttttatgtctacttgggcacctaaaaaaaaacactatgtaaatataaattctattcatttatttaaagcaatgtttacgtggattttcaacttagcaaaaaaaaatttgactaaaaatattgtcgacctttagtttacaggaaattgtgtttagatgagaaaactaaacatatttaaaatcaggtttaacttactctctgtgtgtgtgtgtgtctgtatgtgtaagtggggtagaaaatatgtgatgcattacataaatacatgaagccttaccttttaaagcataaaatgtaagtatagacacattagagatcaagaaagaagaagatagcagagaaggacacctcgctcctttgttatcagaggcccaggttagaatctaaaacagggaaagttatagtacctacaccacacaggactgatacattgaaagacagttaattaaatgttcagcaaatgcctgggatataacaattgctttataaatgttctctactattgttctgaaattatctttttaagtatgctcccttactggacagaaaattattctagacatgaaaactgttctgtttatttttaaattcacaacacctggcccagggcctggcacacaatagatggtggcacacaatgaatgttcatttggcacacagtgaatgttcatccaaccaaattgagtggcacttcaaaagacttggcttgttccctcttggtacctttagagagtagcaaatttacaatattccaagatgcagaagcagttgctaatataagtggagagcgtccttcagaatcgatcttattaatatctg
